(19) United States
(12) Patent Application Publication
(10) Pub. No.: US 2026/0085095 A1
(43) Pub. Date: Mar. 26, 2026

(54) AAV CAPSID VARIANTS AND USES THEREOF

(71) Applicant: VOYAGER THERAPEUTICS, INC., Lexington, MA (US)

(72) Inventors: Mathieu Emmanuel Nonnenmacher, Boston, MA (US); Jing Lin, Watertown, MA (US); Hongxing Wang, Newton, MA (US); Jinzhao Hou, Lexington, MA (US); Wei Wang, Arlington, MA (US); Jiangyu Li, Watertown, MA (US)

(21) Appl. No.: 18/865,157

(22) PCT Filed: Jun. 1, 2023
(86) PCT No.: PCT/US2023/067749

§ 371 Date: Nov. 12, 2024

Related U.S. Application Data
(60) Provisional application No. 63/348,154, filed on Jun. 2, 2022.
(60) Provisional application No. 63/501,935, filed on May 12, 2023.

(51) Int. Cl. C07K 14/005; C12N 15/86

(52) U.S. Cl. CPC C07K 14/005; C12N 15/86; C12N 2750/14122; C12N 2750/14143; C12N 2750/14151

(57) ABSTRACT

The disclosure relates to compositions and methods for the preparation, use, and/or formulation of adeno-associated virus capsid protein variants.

### RELATED APPLICATIONS

[0001] This application claims priority to U.S. Provisional Application No. 63/348,154 filed on Jun. 2, 2022 and U.S. Provisional Application No. 63/501,935 filed on May 12, 2023; the entire contents of each of which are hereby incorporated by reference in their entirety.

### SEQUENCE LISTING

[0002] The instant application contains a Sequence Listing which has been submitted electronically in XML format and is hereby incorporated by reference in its entirety. Said XML copy, created on Mar. 21, 2023, is named V2071-1110PCT_SL.xml and is 1,725,870 bytes in size.

### FIELD OF THE DISCLOSURE

[0003] The disclosure relates to compositions and methods for the preparation, use, and/or formulation of adeno-associated virus capsid proteins and variants thereof.

### BACKGROUND

[0004] Gene delivery to the adult central nervous system (CNS) remains a significant challenge in gene therapy. Engineered adeno-associated virus (AAV) capsids with improved brain tropism represent an attractive solution to the limitations of CNS delivery.

[0005] AAV-derived vectors are promising tools for clinical gene transfer because of their non-pathogenic nature, their low immunogenic profile, low rate of integration into the host genome and long-term transgene expression in non-dividing cells. However, the transduction efficiency of AAV natural variants in certain organs is too low for clinical applications, and capsid neutralization by pre-existing neutralizing antibodies may prevent treatment of a large proportion of patients. For these reasons, considerable efforts have been devoted to obtaining capsid variants with enhanced properties. Of many approaches tested so far, significant advances have resulted from directed evolution of AAV capsids using in vitro or in vivo selection of capsid variants created by capsid sequence randomization using either error-prone PCR, shuffling of various parent serotypes, or insertion of fully randomized short peptides at defined positions.

[0006] Attempts at providing AAV capsids with improved properties, e.g., improved tropism to a target cell or tissue upon systemic administration, have met with limited success. As such, there is a need for improved methods of producing AAV capsids and resulting AAV capsids for delivery of a payload of interest to a target cell or tissue, e.g., a CNS cell or tissue.

### SUMMARY OF THE DISCLOSURE

[0007] The present disclosure pertains at least in part, to compositions and methods for the production and use of an AAV particle comprising an AAV capsid polypeptide, e.g., an AAV capsid variant. In some embodiments, the AAV capsid variant has an enhanced tropism for a tissue or a cell, e.g., a CNS tissue or a CNS cell. Said tropism can be useful for delivery of a payload, e.g., a payload described herein to a cell or tissue, for the treatment of a disorder, e.g., a neurological or a neurodegenerative disorder, a muscular or a neuromuscular disorder, or a neuro-oncological disorder.

[0008] Accordingly, in one aspect, the present disclosure provides an AAV capsid variant, comprising an amino acid sequence having the following formula: [N1]-[N2]-[N3] (SEQ ID NO: 4681), wherein [N2] comprises the amino acid sequence of DWHR (SEQ ID NO: 4682) and wherein (i) [N1] comprises positions X₁, X₂, X₃, and X₄, wherein position X₄ is Q, K, E, S, P, R, N, H, or a conservative substitution thereof; and/or (ii) [N3] comprises positions X₅, X₆, and X₇, wherein position X₅ is I, V, T, M, S, N, L, F, or a conservative substitution thereof. In some embodiments, position X₄ of [N1] is Q. In some embodiments, position X₄ of [N1] is K, In some embodiments, position X₅ of [N3] is I, In some embodiments. [N1] replaces positions 582-585 (e.g., T582, N583, H584, Q585), numbered according to SEQ ID NO: 138. In some embodiments, [N1] corresponds to positions 582-585 (e.g., T582, N583, T584, Q585) of SEQ ID NO: 981. In some embodiments, [N1] is present at positions 582-585, numbered according to SEQ ID NO: 981. In some embodiments, X₁ of [N1] is present at position 582, X₂ of [N1] is present at position 583, X₃ of [N1] is present at position 584, and X₄ of [N1] is present at position 585, numbered according to SEQ ID NO: 981. In some embodiments. [N2] replaces positions 586-589 (e.g., S586, A587, Q588, A589), numbered according to SEQ ID NO: 138. In some embodiments [N2] corresponds to positions 586-589 (e.g., D586, W587, H588, and R589) of SEQ ID NO: 981. In some embodiments. [N2] is present at positions 586-589, numbered according to SEQ ID NO: 981. In some embodiments [N3] replaces positions 590-592 (e.g., Q590, A591, Q592), numbered according to SEQ ID NO: 138. In some embodiments. [N3] corresponds to positions 590-592 (e.g., 1590, A591, Q592) of SEQ ID NO: 981. In some, embodiments. [N3] is present at positions 590-592, numbered according to SEQ ID NO: 981. In some embodiments, X₅ of [N3] is present at position 590, X₆ of [N3] is present at position 591, and X₇ of [N3] is present at position 592, numbered according to SEQ ID NO: 981. In some embodiments. [N1]-[N2] is present at positions 582-589, numbered according to SEQ ID NO: 981. In some embodiments, [N2]-[N3] is present at positions 586-592, numbered according to SEQ ID NO: 981. In some embodiments. [N1]-[N2]-[N3] is present at positions 582-592, numbered according to SEQ ID NO: 981.

[0009] In another aspect, the present disclosure provides an AAV capsid variant comprising an amino acid sequence having the following formula: [N1]-[N2]-[N3] (SEQ ID NO: 4683), wherein [N2] comprises the amino acid sequence of DWHR (SEQ ID NO: 4682) and wherein (i) [N1] comprises positions X₁, X₂, X₃, and X₄, wherein position X₄ is Q, P, or a conservative substitution thereof; and/or (ii) [N3] comprises positions X₅, X₆, and X₇, wherein position X₅ is I, V, or a conservative substitution thereof. In some embodiments, position X₄ of [N1] is Q. In some embodiments, position X₅ of [N3] is I, In some embodiments, [N1] replaces positions 582-585 (e.g., T582, N583, H584, Q585), numbered according to SEQ ID NO: 138. In some embodiments, [N1] corresponds to positions 582-585 (e.g., T582, N583, T584, Q585) of SEQ ID NO: 981. In some embodiments. [N1] is present at positions 582-585, numbered according to SEQ ID NO: 981. In some embodiments, X₁ of [N1] is present at position 582, X₂ of [N1] is present at position 583, X₃ of [N1] is present at position 584, and X₄ of [N1] is present at position 585, numbered according to SEQ ID NO: 981. In some embodiments. [N2] replaces positions 586-589 (e.g., S586, A587, Q588, A589), numbered according to SEQ ID NO: 138. In some embodiments [N2] corresponds to positions 586-589 (e.g., D586, W587, H588, and R589) of SEQ ID NO: 981. In some embodiments, [N2] is present at positions 586-589, numbered according to SEQ ID NO: 981. In some embodiments [N3] replaces positions 590-592 (e.g., Q590, A591, Q592), numbered according to SEQ ID NO: 138. In some embodiments. [N3] corresponds to positions 590-592 (e.g., 1590, A591, Q592) of SEQ ID NO: 981. In some, embodiments. [N3] is present at positions 590-592, numbered according to SEQ ID NO: 981. In some embodiments. X₅ of [N3] is present at position 590, X₆ of [N3] is present at position 591, and X₇ of [N3] is present at position 592, numbered according to SEQ ID NO: 981. In some embodiments. [N1]-[N2] is present at positions 582-589, numbered according to SEQ ID NO: 981. In some embodiments. [N2]-[N3] is present at positions 586-592, numbered according to SEQ ID NO: 981. In some embodiments. [N1]-[N2]-[N3] is present at positions 582-592, numbered according to SEQ ID NO: 981.

[0010] In another aspect, the present disclosure provides an AAV capsid variant comprising (a) the amino acid sequence of any of the sequences provided in Tables 1, 2A, 2B, 9, 14, 15, or 16; (b) an amino acid sequence comprising at least 3, 4, 5, 6, 7, 8, 9, 10, 11, 12, 13, or 14, consecutive amino acids from any one of the sequences provided in Tables 11, 2A, 2B, 9, 14, 15, or 16; (c) an amino acid sequence comprising at least one, two, or three, but no more than four different amino acids, relative to any one of the sequences provided in Tables 1, 2A, 2B, 9, 14, 15, or 16; or (d) an amino acid sequence comprising at least one, two, or three but no more than four modifications, e.g., substitutions (e.g., conservative substitutions), relative to the amino acid sequence of any one of the sequences provided in Tables 1, 2A, 2B, 9, 14, 15, or 16. In some embodiments, the amino acid sequence is present in loop VIII. In some embodiments, the amino acid sequence replaces positions 582, 583, 584, 585, 586, 587, 588, 589, 590, 591, 592, 593, 594, 595, and/or 596 (e.g., T582, N583, H584, Q585, S586, A587, Q588, A589, Q590, A591, Q592, T593, G594, W595, and/or V596), numbered according to SEQ ID NO: 138.

[0011] In yet another aspect, the present disclosure provides an AAV capsid variant comprising (a) the amino acid sequence of any of SEQ ID NOs: 201, 205-209, 211-214, 216, 219, 220, 230, 232, 237, 238, 255, 262-265, 274, 283, 286, 290, 291, 293, 301, 306, 307, 308, 309, 314, or 336; (b) an amino acid sequence comprising at least 3, 4, 5, 6, 7, 8, 9, 10, 11, 12, 13, or 14 consecutive amino acids from any one of SEQ ID NOs: 201, 205-209, 211-214, 216, 219, 220, 230, 232, 237, 238, 255, 262-265, 274, 283, 286, 290, 291, 293, 301, 306, 307, 308, 309, 314, or 336; (c) an amino acid sequence comprising at least one, two, or three but no more than four different amino acids, relative to the amino acid sequence of any one of SEQ ID NOs: 201, 205-209, 211-214, 216, 219, 220, 230, 232, 237, 238, 255, 262-265, 274, 283, 286, 290, 291, 293, 301, 306, 307, 308, 309, 314, or 336; (d) an amino acid sequence comprising at least one, two, or three but no more than four modifications, e.g., substitutions (e.g., conservative substitutions), relative to the amino acid sequence of any one of SEQ ID NOs: 201, 205-209, 211-214, 216, 219, 220, 230, 232, 237, 238, 255, 262-265, 274, 283, 286, 290, 291, 293, 301, 306, 307, 308, 309, 314, or 336. In some embodiments, the amino acid sequence is present in loop VIII. In some embodiments, the amino acid sequence replaces positions 582, 583, 584, 585, 586, 587, 588, 589, 590, 591, 592, 593, 594, 595, and/or 596 (e.g., T582, N583, H584, Q585, S586, A587, Q588, A589, Q590, A591, Q592, T593, G594, W595, and/or V596), numbered according to SEQ ID NO: 138. In some embodiments, the amino acid sequence replaces positions 581, 582, 583, 584, 585, 586, 587, 588, 589, 590, 591, 592, 593, 594, 595, and/or 596 (e.g., A581, T582, N583, H584, Q585, S586, A587, Q588, A589, Q590, A591, Q592, T593, G594, W595, and/or V596), numbered according to SEQ ID NO: 138.

[0012] In yet another aspect, the present disclosure provides a polynucleotide encoding an AAV capsid variant described herein. In some embodiments, the polynucleotide comprises (i) a nucleotide sequence comprising at least one, two, three, four, five, six, or seven modifications, e.g., substitutions (e.g., conservative substitutions), but no more than ten modifications, e.g., substitutions (e.g., conservative substitutions), relative to the nucleotide sequences of SEQ ID NO: 942; (ii) a nucleotide sequence comprising at least one, two, three, four, five, six, or seven, but no more than ten different nucleotides, relative to the nucleotide sequences of SEQ ID NO: 942; or (iii) the nucleotide sequence of SEQ ID NOs: 942, or nucleotide sequence substantially identical (e.g., having at least 70%, 75%, 80%, 85%, 90%, 92%, 95%, 97%, 98%, or 99% sequence identity) thereto.

[0013] In yet another aspect, present disclosure provides an AAV capsid variant comprising an amino acid sequence comprising at least 3, 4, 5, 6, or 7 consecutive amino acids from the amino acid sequence of TQDWHRI (SEQ ID NO: 941), wherein: (i) the 3 consecutive amino acids comprise TQD; (ii) the 4 consecutive amino acids comprise TQDW (SEQ ID NO: 4684); (iii) the 5 consecutive amino acids comprise TQDWH (SEQ ID NO: 4685); or (iv) the 6 consecutive amino acids comprise TQDWHR (SEQ ID NO: 4686); wherein the AAV capsid variant comprises: (a) a VP1 protein comprising the amino acid sequence of SEQ ID NO: 138 or SEQ ID NO: 981; (b) a VP2 protein comprising the amino acid sequence of positions 138-736 of SEQ ID NO: 138 or positions 138-736 of SEQ ID NO: 981; (c) a VP3 protein comprising the amino acid sequence of positions 203-736 of SEQ ID NO: 138 or positions 203-736 of SEQ ID NO: 981; or (d) an amino acid sequence with at least 70% (e.g., at least 75, 80, 85, 90, 95, 96, 97, 98, or 99%) sequence identity to any of the amino acid sequences in (a)-(c).

[0014] In yet another aspect, the present disclosure provides an AAV capsid variant comprising one or two, but no more than three substitutions relative to the amino acid sequence of TQDWHRI (SEQ ID NO: 941), wherein the AAV capsid variant comprises: (a) a VP1 protein comprising the amino acid sequence of SEQ ID NO: 138 or SEQ ID NO: 981; (b) a VP2 protein comprising the amino acid sequence of positions 138-736 of SEQ ID NO: 138 or positions 138-736 of SEQ ID NO: 981; (c) a VP3 protein comprising the amino acid sequence of positions 203-736 of SEQ ID NO: 138 or positions 203-736 of SEQ ID NO: 981; or (d) an amino acid sequence with at least 70% (e.g., at least 75, 80, 85, 90, 95, 96, 97, 98, or 99%) sequence identity to any of the amino acid sequences in (a)-(c).

[0015] In yet another aspect, the present disclosure provides an AAV capsid variant comprising one, two, three, four, five or all of an amino acid other than H at position 584 (e.g., T), S at position 586 (e.g., D), A at position 587 (e.g., W), Q at position 588 (e.g., H), A at position 589 (e.g., R), and/or Q at position 590 (e.g., I), numbered according to SEQ ID NO: 138. In some embodiments, the AAV capsid variant comprises an amino acid other than H at position 584 (e.g., T), S at position 586 (e.g., D), A at position 587 (e.g., W), Q at position 588 (e.g., H), A at position 589 (e.g., R), and/or Q at position 590 (e.g., I), numbered according to SEQ ID NO: 138. In some embodiments, the AAV capsid variant comprises one, two, three, four, five or all of the amino acid T at position 584, D at position 586, W at position 587, H at position 588, R at position 589, and/or I at position 590, numbered according to SEQ ID NO: 138 or 981. In some embodiments, the AAV capsid variant comprises the amino acid T at position 584, D at position 586, W at position 587, H at position 588, R at position 589, and I at position 590, numbered according to SEQ ID NO: 138 or 981.

[0016] In yet another aspect, the present disclosure provides comprising one, two, three, four, five or all of the amino acid T at position 584, D at position 586, W at position 587, H at position 588, R at position 589, and/or I at position 590, numbered according to SEQ ID NO: 138 or 981. In some embodiments, the AAV capsid variant comprises the amino acid T at position 584, D at position 586, W at position 587, H at position 588, R at position 589, and I at position 590, numbered according to SEQ ID NO: 138 or 981.

[0017] In yet another aspect, the present disclosure provides an AAV capsid variant comprising one, two, three, four, five or all of the substitutions H584T, S586D, A587W, Q588H, A589R, and/or Q590I, numbered according to SEQ ID NO: 138. In some embodiments, the AAV capsid variant comprises the substitutions H584T, S586D, A587W, Q588H, A589R, and Q590I, numbered according to SEQ ID NO: 138.

[0018] In yet another aspect, the present disclosure provides an AAV capsid variant comprising the amino acid T at position 584, D at position 586, W at position 587, H at position 588, R at position 589, and I at position 590, numbered according to SEQ ID NO: 138 or 981.

[0019] In another aspect, the present disclosure provides an AAV capsid variant comprising the substitutions H584T, S586D, A587W, Q588H, A589R, and Q590I, numbered according to SEQ ID NO: 138.

[0020] In yet another aspect, the present disclosure provides an AAV capsid variant comprising the amino acid sequence of positions 203-736 of SEQ ID NO: 981, or an amino acid sequence at least 80% (e.g., at least 85, 90, 95, 96, 97, 98, or 99%) thereto, wherein the AAV capsid variant comprises the amino acid T at position 584, D at position 586, W at position 587, H at position 588, R at position 589, and I at position 590, numbered according to SEQ ID NO: 981. In some embodiments, the AAV capsid variant comprises the amino acid sequence of positions 203-736 of SEQ ID NO: 981. In some embodiments, the AAV capsid variant comprises the amino acid sequence of positions 138-736 of SEQ ID NO: 981. In some embodiments, the AAV capsid variant comprises the amino acid sequence of SEQ ID NO: 981.

[0021] In yet another aspect, the present disclosure provides an AAV capsid variant comprising the amino acid sequence of positions 138-736 of SEQ ID NO: 981, or an amino acid sequence at least 80% (e.g., at least 85, 90, 95, 96, 97, 98, or 99%) thereto, wherein the AAV capsid variant comprises the amino acid T at position 584, D at position 586, W at position 587, H at position 588, R at position 589, and I at position 590, numbered according to SEQ ID NO: 981. In some embodiments, the AAV capsid variant comprises the amino acid sequence of positions 138-736 of SEQ ID NO: 981. In some embodiments, the AAV capsid variant comprises the amino acid sequence of SEQ ID NO: 981.

[0022] In yet another aspect, the present disclosure provides an AAV capsid variant comprising the amino acid sequence of SEQ ID NO: 981, or an amino acid sequence at least 80% (e.g., at least 85, 90, 95, 96, 97, 98, or 99%) thereto, wherein the AAV capsid variant comprises the amino acid T at position 584, D at position 586, W at position 587, H at position 588, R at position 589, and I at position 590, numbered according to SEQ ID NO: 981. In some embodiments, the AAV capsid variant comprises an amino acid sequence comprising 30, 20, or 10 modifications, e.g., substitutions (e.g., conservative substitutions), relative to the amino acid sequence of SEQ ID NO: 981. In some embodiments, the AAV capsid variant comprises the amino acid sequence of SEQ ID NO: 981.

[0023] In yet another aspect, the present disclosure provides an AAV capsid variant comprising the amino acid sequence of SEQ ID NO: 981.

[0024] In yet another aspect, the present disclosure provides an AAV capsid variant comprising an amino acid sequence encoded by the nucleotide sequence of SEQ ID NO: 983, or a nucleotide sequence at least 95% identical thereto.

[0025] In yet another aspect, the present disclosure provides a peptide comprising: (a) the amino acid sequence of any of the sequences provided in Tables 1, 2A, 2B, 9, 14, 15, or 16; (b) an amino acid sequence comprising at least 3, 4, 5, 6, 7, 8, 9, 10, 11, 12, 13, or 14 consecutive amino acids from any one of the sequences provided in Tables 1, 2A, 2B, 9, 14, 15, or 16; (c) an amino acid sequence comprising at least one, two, or three, but no more than four different amino acids relative to the amino acid sequence of any one of the sequences provided in Tables 1, 2A, 2B, 9, 14, 15, or 16; or (d) an amino acid sequence comprising at least one, two, or three but no more than four modifications, e.g., substitutions (e.g., conservative substitutions), relative to the amino acid sequence of any one of the sequences provided in Tables 1, 2A, 2B, 9, 14, 15, or 16.

[0026] In another aspect, the present disclosure provides a peptide comprising (a) the amino acid sequence of any of SEQ ID NOs: 201, 205-209, 211-214, 216, 219, 220, 230, 232, 237, 238, 255, 262-265, 274, 283, 286, 290, 291, 293, 301, 306, 307, 308, 309, 314, or 336; (b) an amino acid sequence comprising at least 3, 4, 5, 6, 7, 8, 9, 10, 11, 12, 13, or 14 consecutive amino acids from any one of SEQ ID NOs: 201, 205-209, 211-214, 216, 219, 220, 230, 232, 237, 238, 255, 262-265, 274, 283, 286, 290, 291, 293, 301, 306, 307, 308, 309, 314, or 336; (c) an amino acid sequence comprising at least one, two, or three, but no more than four different amino acids relative to the amino acid sequence of any one of SEQ ID NOs: 201, 205-209, 211-214, 216, 219, 220, 230, 232, 237, 238, 255, 262-265, 274, 283, 286, 290, 291, 293, 301, 306, 307, 308, 309, 314, or 336; or (d) an amino acid sequence comprising at least one, two, or three but no more than four modifications, e.g., substitutions (e.g., substitutions), relative to the amino acid sequence of any one of SEQ ID NOs: 201, 205-209, 211-214, 216, 219, 220, 230, 232, 237, 238, 255, 262-265, 274, 283, 286, 290, 291, 293, 301, 306, 307, 308, 309, 314, or 336.

[0027] In yet another aspect, the present disclosure provides a peptide comprising: (i) the amino acid sequence of TQDWHRI (SEQ ID NO: 941); (ii) an amino acid sequence comprising at least one, two, or three, but no more than four different amino acids relative to the amino acid sequence of TQDWHRI (SEQ ID NO: 941); (iii) an amino acid sequence comprising at least one, two, or three modifications, e.g., substitutions (e.g., conservative substitutions), but no more than four modifications, e.g., substitutions (e.g., conservative substitutions), relative to the amino acid sequence of TQDWHRI (SEQ ID NO: 941); or (iv) at least 3, 4, or 5 consecutive amino acids from the amino acid sequence of TQDWHRI (SEQ ID NO: 941).

[0028] In yet another aspect, the present disclosure provides a peptide encoded by (i) the nucleotide sequence of SEQ ID NO: 942, or a nucleotide sequence substantially identical (e.g., having at least 70%, 75%, 80%, 85%, 90%, 92%, 95%, 97%, 98%, or 99% sequence identity) thereto; or (ii) a nucleotide sequence comprising at least one, two, three, four, five, six, or seven, but no more than ten different nucleotides relative to the nucleotide sequence of SEQ ID NO: 942; or (iii) a nucleotide sequence comprising at least one, two, three, four, five, six, or seven modifications, e.g., substitutions, but no more than ten modifications, e.g., substitutions, relative to the nucleotide sequence of SEQ ID NO: 942.

[0029] In yet another aspect, the present disclosure provides a nucleotide sequence encoding a peptide comprising (i) the nucleotide sequence of SEQ ID NO: 942, or a nucleotide sequence substantially identical (e.g., having at least 70%, 75%, 80%, 85%, 90%, 92%, 95%, 97%, 98%, or 99% sequence identity) thereto; (ii) a nucleotide sequence comprising at least one, two, three, four, five, six, or seven, but not more than 10 different nucleotides, relative to the nucleotide sequence of SEQ ID NO: 942; or (iii) a nucleotide sequence comprising at least one, two, three, four, five, six, or seven modifications, e.g., substitutions, but no more than ten modifications, e.g., substitutions, relative to the nucleotide sequence of SEQ ID NO: 942.

[0030] In yet another aspect, the present disclosure provides a polynucleotide encoding an AAV capsid variant comprising: (a) the amino acid sequence of any of the sequences provided in Tables 1, 2A, 2B, 9, 14, 15, or 16; (b) an amino acid sequence comprising at least 3, 4, 5, 6, 7, 8, 9, 10, 11, 12, 13, or 14 consecutive amino acids from any one of the sequences provided in Tables 1, 2A, 2B, 9, 14, 15, or 16; (c) an amino a sequence comprising at least one, two, or three but no more than four different amino acids, relative to the amino acid sequence of any one of the sequences provided in Tables 1, 2A, 2B, 9, 14, 15, or 16; or (d) an amino acid sequence comprising at least one, two, or three but no more than four modifications, e.g., substitutions (conservative substitutions), relative to the amino acid sequence of any one of the sequences provided in Tables 1, 2A, 2B, 9, 14, 15, or 16. In some embodiments, the amino acid sequence of (a), (b), (c), and/or (d) replaces position 582, 583, 584, 585, 586, 587, 588, 589, 590, 591, 592, 593, 594, 595, and/or 596 (e.g., T582, N583, H584, Q585, S586, A587, Q588, A589, Q590, A591, Q592, T593, G594, W595, and/or V596), numbered according to the amino acid sequence of SEQ ID NO: 138. In some embodiments, the amino acid sequence of (a), (b), (c), and/or (d) corresponds to positions 582, 583, 584, 585, 586, 587, 588, 589, 590, 591, 592, 593, 594, 595, and/or 596 (e.g., T582, N583, T584, Q585, D586, W587, H588, R589, 1590, A591, Q592, T593, G594, W595, and/or V596) of SEQ ID NO: 981.

[0031] In yet another aspect, the present disclosure provides a polynucleotide encoding an AAV capsid variant, wherein the AAV capsid variant comprises: (i) the amino acid sequence of TQDWHRI (SEQ ID NO: 941); (ii) an amino acid sequence comprising at least one, two, or three, but no more than four different amino acids, relative to the amino acid sequence of TQDWHRI (SEQ ID NO: 941); (iii) an amino acid sequence comprising at least one, two, or three modifications, e.g., substitutions (e.g., conservative substitutions), but no more than four modifications, e.g., substitutions (e.g., conservative substitutions), relative to the amino acid sequence of TQDWHRI (SEQ ID NO: 941); or (iv) at least 3, 4, 5, 6, 7, 8, or 9 consecutive amino acids from the amino acid sequence of TQDWHRI (SEQ ID NO: 941). In some embodiments, the amino acid sequence of (i), (ii), (iii), and/or (iv) replaces positions 584, 585, 586, 587, 588, 589, and/or 590 (e.g., H584, Q585, S586, A587, Q588, A589, and/or Q590), numbered according to the amino acid sequence of SEQ ID NO: 138. In some embodiments, the amino acid sequence of (i), (ii), (iii), and/or (iv) corresponds to positions 584, 585, 586, 587, 588, 589, and/or 590 (e.g., T584, Q585, D586, W587, H588, R589, and/or 1590) of SEQ ID NO: 981.

[0032] In yet another aspect, the present disclosure provides an AAV particle comprising an AAV capsid variant, described herein. In some embodiments, the AAV particle comprises a nucleic acid sequence encoding a payload. In some embodiments, the AAV particle further comprises a viral genome comprising a promoter operably linked to the nucleic acid encoding the payload.

[0033] In yet another aspect, the present disclosure provides a method of making an AAV particle comprising an AAV capsid variant described herein. The method comprises providing a host cell comprising a viral genome and incubating the host cell under conditions suitable to enclose the viral genome in the AAV capsid variant, e.g., an AAV capsid variant described herein, thereby making the AAV particle.

[0034] In yet another aspect, the present disclosure provides a method of delivering a payload to a cell or tissue (e.g., a CNS cell or a CNS tissue). The method comprising administering an effective amount of an AAV particle comprising an AAV capsid variant described herein.

[0035] In yet another aspect, the present disclosure provides a method of treating a subject having or diagnosed with having a genetic disorder, e.g., a monogenic disorder or a polygenic disorder. The method comprising administering to the subject an effective amount an AAV particle comprising an AAV capsid variant described herein.

[0036] In yet another aspect, the present disclosure provides a method of treating a subject having or diagnosed with having neurological, e.g., a neurodegenerative, disorder. The method comprising administering an effective amount of an AAV particle comprising an AAV capsid variant described herein.

[0037] In yet another aspect, the present disclosure provides a method of treating a subject having or diagnosed with having a neuro-oncological disorder. The method comprising administering an effective amount of an AAV particle comprising an AAV capsid variant described herein.

[0038] Those skilled in the art will recognize or be able to ascertain using no more than routine experimentation, many equivalents to the specific embodiments of the invention described herein. Such equivalents are intended to be encompassed by the following enumerated embodiments.

### ENUMERATED EMBODIMENTS

[0039] 1. An AAV capsid variant (e.g., an AAV9 capsid variant) comprising an amino acid sequence having the following formula: [N1]-[N2]-[N3] (SEQ ID NO: 4681), wherein [N2] comprises the amino acid sequence of DWHR (SEQ ID NO: 4682) and wherein:
[0040] (i) [N1] comprises positions X₁, X₂, X₃, and X₄, wherein position X₄ is Q, K, E, S, P, R, N, H, or a conservative substitution thereof; and/or
[0041] (ii) [N3] comprises positions X₅, X₆, and X₇, wherein position X₅ is I, V, T, M, S, N, L, F, or a conservative substitution thereof.

[0042] 2. The AAV capsid variant of embodiment 1, which comprises the amino acid Q at position 585, numbered according to SEQ ID NO: 138 or 981.

[0043] 3. The AAV capsid variant of embodiment 1, which comprises an amino acid other than Q at position 585, numbered according to SEQ ID NO: 138 or 981.

[0044] 4. The AAV capsid variant of embodiment 1 or 3, which comprises the amino acid K at position 585, numbered according to SEQ ID NO: 138 or 981.

[0045] 5. The AAV capsid variant of any one of embodiments 1-4, which comprises one, two, three, or all of an amino acid other than T at position 582 (e.g., S, R, A, I, C, N, K, L, or Q), an amino acid other than N at position 583 (e.g., T, G, V, S, Y, K, I, H, D, or F), an amino acid other than H at position 584 (e.g., T, N, K, D, I, S, P, A, Y, E, V, L, M, R, Q, or C), and/or an amino acid other than Q at position 585 (e.g., K, E, S, P, R, N, H), numbered according to SEQ ID NO: 138.

[0046] 6. The AAV capsid variant of any one of embodiments 1-5, wherein [N1] comprises positions X₁, X₂, X₃, and X₄, wherein position X₄ is Q, K, E, S, P, R, N, or H.

[0047] 7. The AAV capsid variant of any one of embodiments 1-6, wherein position X₄ is Q or K.

[0048] 8. The AAV capsid variant of any one of embodiments 1, 2, or 5-7, wherein position X₄ is Q.

[0049] 9. The AAV capsid variant of any one of embodiments 1 or 3-7, wherein position X₄ is K.

[0050] 10. The AAV capsid variant of any one of embodiments 1-9, which comprises an amino acid other than H at position 584 (e.g., T), numbered according to SEQ ID NO: 138.

[0051] 11. The AAV capsid variant of any one of embodiments 1-10, which comprises the amino acid T at position 584, numbered according to SEQ ID NO: 138 or 981.

[0052] 12. The AAV capsid variant of any one of embodiments 1-11, wherein:
[0053] (i) position X₁ is T, S, R, A, I, C, N, K, L, or Q;
[0054] (ii) position X₂ is N, T, G, V, S, Y, K, I, H, D, or F; and/or
[0055] (iii) position X₃ is T, N, K, D, I, S, P, A, Y, E, V, L, M, R, H, Q, or C.

[0056] 13. The AAV capsid variant of any one of embodiments 1-12, wherein [N1] comprises TN, NT, NK, SN, TT, RN, TG, TV, ST, TS, TY, AN, TK, TI, IN, TH, TD, CN, NN, KN, LN, SG, TF, RT, SY, SS, QN, ND, NP, GK, TA, VK, NY, TE, SK, NI, YN, GT, TL, TM, YT, TR, NS, IT, NA, KT, GN, HT, DT, NE, NH, YI, HN, NQ, FS, NM, NL, SM, NC, VT, KQ, TQ, DQ, IQ, SQ, PS, KE, AQ, YQ, TP, EQ, VQ, LQ, MQ, KS, IE, RQ, IK, AK, PK, NR, HQ, QQ, or CQ.

[0057] 14. The AAV capsid variant of any one of embodiments 1-13, wherein [N1] comprises TNT, TNK, TNN, SNN, SNK, SNT, TTN, TND, TTI, RNT, TTK, TTS, TTD, TNP, TTT, TGK, TTA, TVK, TNY, STK, TTE, TSK, TNI, TYN, STI, TTV, TGT, TTL, TTM, ANN, SNI, TKN, TYT, TTR, TNS, TST, TIT, INT, TNA, TKT, STN, ANT, RNN, TGN, TSN, THT, TDT, TNE, CNT, INN, NNN, KNN, LNN, TIN, TNH, STT, SNS, STS, TYI, SGT, THN, TNQ, RNI, TFS, RNS, TNM, RTT, KNT, TNL, TSM, SYT, TNC, SST, TVT, QNT, NTK, NNQ, NKQ, NNE, NTQ, NDQ, TIQ, TKQ, TSQ, TDQ, NPS, NKE, TTQ, GKQ, TAQ, VKQ, NYQ, NTP, TEQ, SKQ, NIQ, YNQ, TVQ, GTQ, NTR, TLQ, TMQ, KNQ, YTQ, NKS, NTE, NIE, TRQ, NSQ. YTK, NIK, NNK, NSK, ITK, NAK, KTK, GNQ, SNQ, HTK, DTK, NEQ, NPK, YTE, NNR, INQ, NHQ, YIQ, HNQ, ITQ, STQ, NSN, NQQ, NNP, ITE, NTN, FSQ, NNH, NMQ, NTS, NLQ, SMQ, NCQ, or VTQ

[0058] 15. The AAV capsid variant of any one of embodiments 1-14, wherein [N1] is or comprises TNTQ (SEQ ID NO: 4688), TNTK (SEQ ID NO: 4689), TNNQ (SEQ ID NO: 4690), SNNQ (SEQ ID NO: 4691), TNKQ (SEQ ID NO: 4692), TNNE (SEQ ID NO: 4693), SNKQ (SEQ ID NO: 4694), SNTQ (SEQ ID NO: 4695), TTNQ (SEQ ID NO: 4696), TNDQ (SEQ ID NO: 4697), TTIQ (SEQ ID NO: 4698), RNTQ (SEQ ID NO: 4699), TTKQ (SEQ ID NO: 4700), TTSQ (SEQ ID NO: 4701), TTDQ (SEQ ID NO: 4702), TNPS (SEQ ID NO: 4703), TNKE (SEQ ID NO: 4704), TTTQ (SEQ ID NO: 4705), TGKQ (SEQ ID NO: 4706), TTAQ (SEQ ID NO: 4707), TVKQ (SEQ ID NO: 4708), TNYQ (SEQ ID NO: 4709), TNTP (SEQ ID NO: 4710), STKQ (SEQ ID NO: 4711), TTEQ (SEQ ID NO: 4712), TSKQ (SEQ ID NO: 4713), TNIQ (SEQ ID NO: 4714), TYNQ (SEQ ID NO: 4715), STIQ (SEQ ID NO: 4716), TTVQ (SEQ ID NO: 4717), TGTQ (SEQ ID NO: 4718), TNTR (SEQ ID NO: 4719), TTLQ (SEQ ID NO: 4720), TTMQ (SEQ ID NO: 4721), ANNQ (SEQ ID NO: 4722), SNIQ (SEQ ID NO: 4723), TKNQ (SEQ ID NO: 4724), TYTQ (SEQ ID NO: 4725), TNKS (SEQ ID NO: 4726), SNTE (SEQ ID NO: 4727), TNTE (SEQ ID NO: 4728), TNIE (SEQ ID NO: 4729), TTRQ (SEQ ID NO: 4730), TNSQ (SEQ ID NO: 4731), TYTK (SEQ ID NO: 4732), TTTK (SEQ ID NO: 4733), TNIK (SEQ ID NO: 4734), SNTK (SEQ ID NO: 4735), TNNK (SEQ ID NO: 4736), TNSK (SEQ ID NO: 4737), TSTK (SEQ ID NO: 4738), TITK (SEQ ID NO: 4739), INTK (SEQ ID NO: 4740), TNAK (SEQ ID NO: 4741), TKTK (SEQ ID NO: 4742), STNQ (SEQ ID NO: 4743), ANTK (SEQ ID NO: 4744), RNNQ (SEQ ID NO: 4745), TGNQ (SEQ ID NO: 4746), TSNQ (SEQ ID NO: 4747), THTK (SEQ ID NO: 4748), TDTK (SEQ ID NO: 4749), TNEQ (SEQ ID NO: 4750), CNTQ (SEQ ID NO: 4751), TNPK (SEQ ID NO: 4752), INNQ (SEQ ID NO: 4753), TYTE (SEQ ID NO: 4754), NNNQ (SEQ ID NO: 4755), KNNQ (SEQ ID NO: 4756), TNNR (SEQ ID NO: 4757), LNNQ (SEQ ID NO: 4758), TINQ (SEQ ID NO: 4759), TNHQ (SEQ ID NO: 4760), STTQ (SEQ ID NO: 4761), SNSQ (SEQ ID NO: 4762), STSQ (SEQ ID NO: 4763), TYIQ (SEQ ID NO: 4764), SGTQ (SEQ ID NO: 4765), THNQ (SEQ ID NO: 4766), TITQ (SEQ ID NO: 4767), TSTQ (SEQ ID NO: 4768), TNSN (SEQ ID NO: 4769), TNQQ (SEQ ID NO: 4770), RNIQ (SEQ ID NO: 4771), TNNP (SEQ ID NO: 4772), TITE (SEQ ID NO: 4773), TNTN (SEQ ID NO: 4774), TFSQ (SEQ ID NO: 4775), RNSQ (SEQ ID NO: 4776), INTQ (SEQ ID NO: 4777), RNTE (SEQ ID NO: 4778), TNNH (SEQ ID NO: 4779), TNMQ (SEQ ID NO: 4780), RTTQ (SEQ ID NO: 4781), SNIE (SEQ ID NO: 4782), TNTS (SEQ ID NO: 4783), KNTQ (SEQ ID NO: 4784), TNLQ (SEQ ID NO: 4785), TSMQ (SEQ ID NO: 4786), SYTQ (SEQ ID NO: 4787), TNCQ (SEQ ID NO: 4788), SSTQ (SEQ ID NO: 4789), TVTQ (SEQ ID NO: 4790), or QNTQ (SEQ ID NO: 4791).

[0059] 16. The AAV capsid variant of any one of embodiments 1-15, wherein [N1] is or comprises TNTQ (SEQ ID NO: 4688).

[0060] 17. The AAV capsid variant of any one of embodiments 1-15, wherein [N1] is or comprises TNTK (SEQ ID NO: 4689).

[0061] 18. The AAV capsid variant of any one of embodiments 1-17, wherein [N1]-[N2] comprises:

(i)
(SEQ ID NO: 4686)
TQDWHR,
(SEQ ID NO: 4792)
TKDWHR,
(SEQ ID NO: 4793)
NQDWHR,
(SEQ ID NO: 4794)
KQDWHR,
(SEQ ID NO: 4795)
NEDWHR,
(SEQ ID NO: 4796)
DQDWHR,
(SEQ ID NO: 4797)
IQDWHR,
(SEQ ID NO: 4798)
SQDWHR,
(SEQ ID NO: 4799)
PSDWHR,
(SEQ ID NO: 4800)
KEDWHR,
(SEQ ID NO: 4801)
AQDWHR,
(SEQ ID NO: 4802)
YQDWHR,
(SEQ ID NO: 4803)
TPDWHR,
(SEQ ID NO: 4804)
EQDWHR,
(SEQ ID NO: 4805)
VQDWHR,
(SEQ ID NO: 4806)
TRDWHR,
(SEQ ID NO: 4807)
LQDWHR,
(SEQ ID NO: 4808)
MQDWHR,
(SEQ ID NO: 4809)
KSDWHR,
(SEQ ID NO: 4810)
TEDWHR,
(SEQ ID NO: 4811)
IEDWHR,
(SEQ ID NO: 4812)
RQDWHR,
(SEQ ID NO: 4813)
IKDWHR,
(SEQ ID NO: 4814)
NKDWHR,
(SEQ ID NO: 4815)
SKDWHR,
(SEQ ID NO: 4816)
AKDWHR,
(SEQ ID NO: 4817)
PKDWHR,
(SEQ ID NO: 4818)
NRDWHR,
(SEQ ID NO: 4819)
HQDWHR,
(SEQ ID NO: 4820)
SNDWHR,
(SEQ ID NO: 4821)
QQDWHR,
(SEQ ID NO: 4822)
NPDWHR,
(SEQ ID NO: 4823)
TNDWHR,
(SEQ ID NO: 4824)
NHDWHR,
(SEQ ID NO: 4825)
TSDWHR,
or
(SEQ ID NO: 4826)
CQDWHR;

[0062] (ii) an amino acid sequence comprising any portion of an amino acid sequence in (i), e.g., any 2, 3, 4, or 5 amino acids, e.g., consecutive amino acids, thereof;
[0063] (iii) an amino acid sequence comprising one, two, or three but no more than four modifications, e.g., substitutions (e.g., conservative substitutions), insertions, or deletions, relative to any of the amino acid sequences in (i); or
[0064] (iv) an amino acid sequence comprising one, two, or three but no more than four different amino acids, relative to any one of the amino acid sequences in (i), 19. The AAV capsid variant of any one of embodiments 1-18, wherein [N1]-[N2] comprises:

(i)
(SEQ ID NO: 4827)
NTQDWHR,
(SEQ ID NO: 4828)
NTKDWHR,
(SEQ ID NO: 4829)
NNQDWHR,
(SEQ ID NO: 4830)
NKQDWHR,
(SEQ ID NO: 4831)
NNEDWHR,
(SEQ ID NO: 4832)
TNQDWHR,
(SEQ ID NO: 4833)
NDQDWHR,
(SEQ ID NO: 4834)
TIQDWHR,
(SEQ ID NO: 4835)
TKQDWHR,
(SEQ ID NO: 4836)
TSQDWHR,
(SEQ ID NO: 4837)
TDQDWHR,
(SEQ ID NO: 4838)
NPSDWHR,
(SEQ ID NO: 4839)
NKEDWHR,
(SEQ ID NO: 4840)
TTQDWHR,
(SEQ ID NO: 4841)
GKQDWHR,
(SEQ ID NO: 4842)
TAQDWHR,
(SEQ ID NO: 4843)
VKQDWHR,
(SEQ ID NO: 4844)
NYQDWHR,
(SEQ ID NO: 4845)
NTPDWHR,
(SEQ ID NO: 4846)
TEQDWHR,
(SEQ ID NO: 4847)
SKQDWHR,
(SEQ ID NO: 4848)
NIQDWHR,
(SEQ ID NO: 4849)
YNQDWHR,
(SEQ ID NO: 4850)
TVQDWHR,
(SEQ ID NO: 4851)
GTQDWHR,
(SEQ ID NO: 4852)
NTRDWHR,
(SEQ ID NO: 4853)
TLQDWHR,
(SEQ ID NO: 4854)
TMQDWHR,
(SEQ ID NO: 4855)
KNQDWHR,
(SEQ ID NO: 4856)
YTQDWHR,
(SEQ ID NO: 4857)
NKSDWHR,
(SEQ ID NO: 4858)
NTEDWHR,
(SEQ ID NO: 4859)
NIEDWHR,
(SEQ ID NO: 4860)
TRQDWHR,
(SEQ ID NO: 4861)
NSQDWHR,
(SEQ ID NO: 4862)
YTKDWHR,
(SEQ ID NO: 4863)
TTKDWHR,
(SEQ ID NO: 4864)
NIKDWHR,
(SEQ ID NO: 4865)
NNKDWHR,
(SEQ ID NO: 4866)
NSKDWHR,
(SEQ ID NO: 4867)
STKDWHR,
(SEQ ID NO: 4868)
ITKDWHR,
(SEQ ID NO: 4869)
NAKDWHR,
(SEQ ID NO: 4870)
KTKDWHR,
(SEQ ID NO: 4871)
GNQDWHR,
(SEQ ID NO: 4872)
SNQDWHR,
(SEQ ID NO: 4873)
HTKDWHR,
(SEQ ID NO: 4874)
DTKDWHR,
(SEQ ID NO: 4875)
NEQDWHR,
(SEQ ID NO: 4876)
NPKDWHR,
(SEQ ID NO: 4877)
YTEDWHR,
(SEQ ID NO: 4878)
NNRDWHR,
(SEQ ID NO: 4879)
INQDWHR,
(SEQ ID NO: 4880)
NHQDWHR,
(SEQ ID NO: 4881)
YIQDWHR,
(SEQ ID NO: 4882)
HNQDWHR,
(SEQ ID NO: 4883)
ITQDWHR,
(SEQ ID NO: 4884)
STQDWHR,
(SEQ ID NO: 4885)
NSNDWHR,
(SEQ ID NO: 4886)
NQQDWHR,
(SEQ ID NO: 4887)
NNPDWHR,
(SEQ ID NO: 4888)
ITEDWHR,
(SEQ ID NO: 4889)
NTNDWHR,
(SEQ ID NO: 4890)
FSQDWHR,
(SEQ ID NO: 4891)
NNHDWHR,
(SEQ ID NO: 4892)
NMQDWHR,
(SEQ ID NO: 4893)
NTSDWHR,
(SEQ ID NO: 4894)
NLQDWHR,
(SEQ ID NO: 4895)
SMQDWHR,
(SEQ ID NO: 4896)
NCQDWHR,
(SEQ ID NO: 4897)
VTQDWHR;

[0065] (ii) an amino acid sequence comprising any portion of an amino acid sequence in (i), e.g., any 2, 3, 4, 5 or 6 amino acids, e.g., consecutive amino acids, thereof;
[0066] (iii) an amino acid sequence comprising one, two, or three but no more than four modifications, e.g., substitutions (e.g., conservative substitutions), insertions, or deletions, relative to any of the amino acid sequences in (i); or
[0067] (iv) an amino acid sequence comprising one, two, or three but no more than four different amino acids, relative to any one of the amino acid sequences in (i).

[0068] 20. The AAV capsid variant of any one of embodiments 1-19, wherein [N1]-[N2] is or comprises:

(i)
(SEQ ID NO: 4898)
TNTQDWHR,
(SEQ ID NO: 4899)
TNTKDWHR,
(SEQ ID NO: 4900)
TNNQDWHR,
(SEQ ID NO: 4901)
SNNQDWHR,
(SEQ ID NO: 4902)
TNKQDWHR,
(SEQ ID NO: 4903)
TNNEDWHR,
(SEQ ID NO: 4904)
SNKQDWHR,
(SEQ ID NO: 4905)
SNTQDWHR,
(SEQ ID NO: 4906)
TTNQDWHR,
(SEQ ID NO: 4907)
TNDQDWHR,
(SEQ ID NO: 4908)
TTIQDWHR,
(SEQ ID NO: 4909)
RNTQDWHR,
(SEQ ID NO: 4910)
TTKQDWHR,
(SEQ ID NO: 4911)
TTSQDWHR,
(SEQ ID NO: 4912)
TTDQDWHR,
(SEQ ID NO: 4913)
TNPSDWHR,
(SEQ ID NO: 4914)
TNKEDWHR,
(SEQ ID NO: 4915)
TTTQDWHR,
(SEQ ID NO: 4916)
TGKQDWHR,
(SEQ ID NO: 4917)
TTAQDWHR,
(SEQ ID NO: 4918)
TVKQDWHR,
(SEQ ID NO: 4919)
TNYQDWHR,
(SEQ ID NO: 4920)
TNTPDWHR,
(SEQ ID NO: 4921)
STKQDWHR,
(SEQ ID NO: 4922)
TTEQDWHR,
(SEQ ID NO: 4923)
TSKQDWHR,
(SEQ ID NO: 4924)
TNIQDWHR,
(SEQ ID NO: 4925)
TYNQDWHR,
(SEQ ID NO: 4926)
STIQDWHR,
(SEQ ID NO: 4927)
TTVQDWHR,
(SEQ ID NO: 4928)
TGTQDWHR,
(SEQ ID NO: 4929)
TNTRDWHR,
(SEQ ID NO: 4930)
TTLQDWHR,
(SEQ ID NO: 4931)
TTMQDWHR,
(SEQ ID NO: 4932)
ANNQDWHR,
(SEQ ID NO: 4933)
SNIQDWHR,
(SEQ ID NO: 4934)
TKNQDWHR,
(SEQ ID NO: 4935)
TYTQDWHR,
(SEQ ID NO: 4936)
TNKSDWHR,
(SEQ ID NO: 4937)
SNTEDWHR,
(SEQ ID NO: 4938)
TNTEDWHR,
(SEQ ID NO: 4939)
TNIEDWHR,
(SEQ ID NO: 4940)
TTRQDWHR,
(SEQ ID NO: 4941)
TNSQDWHR,
(SEQ ID NO: 4942)
TYTKDWHR,
(SEQ ID NO: 4943)
TTTKDWHR,
(SEQ ID NO: 4944)
TNIKDWHR,
(SEQ ID NO: 4945)
SNTKDWHR,
(SEQ ID NO: 4946)
TNNKDWHR,
(SEQ ID NO: 4947)
TNSKDWHR,
(SEQ ID NO: 4948)
TSTKDWHR,
(SEQ ID NO: 4949)
TITKDWHR,
(SEQ ID NO: 4950)
INTKDWHR,
(SEQ ID NO: 4951)
TNAKDWHR,
(SEQ ID NO: 4952)
TKTKDWHR,
(SEQ ID NO: 4953)
STNQDWHR,
(SEQ ID NO: 4954)
ANTKDWHR,
(SEQ ID NO: 4955)
RNNQDWHR,
(SEQ ID NO: 4956)
TGNQDWHR,
(SEQ ID NO: 4957)
TSNQDWHR,
(SEQ ID NO: 4958)
THTKDWHR,
(SEQ ID NO: 4959)
TDTKDWHR,
(SEQ ID NO: 4960)
TNEQDWHR,
(SEQ ID NO: 4961)
CNTQDWHR,
(SEQ ID NO: 4962)
TNPKDWHR,
(SEQ ID NO: 4963)
INNQDWHR,
(SEQ ID NO: 4964)
TYTEDWHR,
(SEQ ID NO: 4965)
NNNQDWHR,
(SEQ ID NO: 4966)
KNNQDWHR,
(SEQ ID NO: 4967)
TNNRDWHR,
(SEQ ID NO: 4968)
LNNQDWHR,
(SEQ ID NO: 4969)
TINQDWHR,
(SEQ ID NO: 4970)
TNHQDWHR,
(SEQ ID NO: 4971)
STTQDWHR,
(SEQ ID NO: 4972)
SNSQDWHR,
(SEQ ID NO: 4973)
STSQDWHR,
(SEQ ID NO: 4974)
TYIQDWHR,
(SEQ ID NO: 4975)
SGTQDWHR,
(SEQ ID NO: 4976)
THNQDWHR,
(SEQ ID NO: 4977)
TITQDWHR,
(SEQ ID NO: 4978)
TSTQDWHR,
(SEQ ID NO: 4979)
TNSNDWHR,
(SEQ ID NO: 4980)
TNQQDWHR,
(SEQ ID NO: 4981)
RNIQDWHR,
(SEQ ID NO: 4982)
TNNPDWHR,
(SEQ ID NO: 4983)
TITEDWHR,
(SEQ ID NO: 4984)
TNTNDWHR,
(SEQ ID NO: 4985)
TFSQDWHR,
(SEQ ID NO: 4986)
RNSQDWHR,
(SEQ ID NO: 4987)
INTQDWHR,
(SEQ ID NO: 4988)
RNTEDWHR,
(SEQ ID NO: 4989)
TNNHDWHR,
(SEQ ID NO: 4990)
TNMQDWHR,
(SEQ ID NO: 4991)
RTTQDWHR,
(SEQ ID NO: 4992)
SNIEDWHR,
(SEQ ID NO: 4993)
TNTSDWHR,
(SEQ ID NO: 4994)
KNTQDWHR,
(SEQ ID NO: 4995)
TNLQDWHR,
(SEQ ID NO: 4996)
TSMQDWHR,
(SEQ ID NO: 4997)
SYTQDWHR,
(SEQ ID NO: 4998)
TNCQDWHR,
(SEQ ID NO: 4999)
SSTQDWHR,
(SEQ ID NO: 5000)
TVTQDWHR,
or
(SEQ ID NO: 5001)
QNTQDWHR;

[0069] (ii) an amino acid sequence comprising any portion of an amino acid sequence in (i), e.g., any 2, 3, 4, 5 6, or 7 amino acids, e.g., consecutive amino acids, thereof;
[0070] (iii) an amino acid sequence comprising one, two, or three but no more than four modifications, e.g., substitutions (e.g., conservative substitutions), insertions, or deletions, relative to any of the amino acid sequences in (i); or
[0071] (iv) an amino acid sequence comprising one, two, or three but no more than four different amino acids, relative to any one of the amino acid sequences in (i).

[0072] 21. The AAV capsid variant of any one of embodiments 1-20, wherein [N1]-[N2] is or comprises TNTQDWHR (SEQ ID NO: 4898).

[0073] 22. The AAV capsid variant of any one of embodiments 1-20, wherein [N1]-[N2] is or comprises TNTKDWHR (SEQ ID NO: 4899).

[0074] 23. The AAV capsid variant of any one of embodiments 1-22, which comprises one, two, or all of an amino acid other than Q at position 590 (e.g., I, V, T, M, S, N, L, or F), A at position 591 (e.g., Y, P, N, S, T, G, E, V, W, F, Q), and/or Q at position 592 (e.g., G, N, K, H, R, E, L, P, or M), numbered according to SEQ ID NO: 138.

[0075] 24. The AAV capsid variant of any one of embodiments 1-23, which comprises an amino acid other than Q at position 590 (e.g., I, V, T, M, S, N, L, or F), numbered according to SEQ ID NO: 138.

[0076] 25. The AAV capsid variant of any one of embodiments 1-24, which comprises the amino acid I at position 590, numbered according to SEQ ID NO: 138.

[0077] 26. The AAV capsid variant of any one of embodiments 1-24, which comprises the amino acid V at position 590, numbered according to SEQ ID NO: 138.

[0078] 27. The AAV capsid variant of any one of embodiments 1-26, which comprises the amino acid A at position 591 and/or the amino acid Q at position 592, numbered according to SEQ ID NO: 138 or 981.

[0079] 28. The AAV capsid variant of any one of embodiments 1-27, [N3] comprises positions X₅, X₆, and X₇, wherein position X₅ is I, V, T, M, S, N, L, or F.

[0080] 29. The AAV capsid variant of any one of embodiments 1-28, wherein position X₅ is I or V.

[0081] 30. The AAV capsid variant of any one of embodiments 1-25 or 27-29, wherein position X₅ is I.

[0082] 31. The AAV capsid variant of any one of embodiments 1-30, wherein:
[0083] (i) position X₆ is A, Y, P, N, S, T, G, E, V, W, F, or Q; and/or
[0084] (ii) position X₇ is Q, G, N, K, H, R, E, L, P, or M.

[0085] 32. The AAV capsid variant of any one of embodiments 1-31, wherein [N3] comprises IA, IY, VP, IN, VN, VY, VA, IS, IT, TA, MA, SA, IG, IE, IV, NA, LA, IP, FA, VS, VT, IW, IF, IQ, VQ, AQ, AG, YQ, PQ, AN, NQ, SG, SQ, TQ, GQ, EQ, AK, AH, AR, AE, AL, AP, TM, SM, WQ, FQ, QQ, FM, AM, or SN.

[0086] 33. The AAV capsid variant of any one of embodiments 1-32, wherein [N3] is or comprises IAQ, IAG, IYQ, VPQ, IAN, INQ, VNQ, VYQ, VAN, ISG, ISQ, VAQ, ITQ, TAQ, MAQ, SAQ, IGQ, IEQ, IVQ, NAQ, LAQ, IAK, IAH, IPQ, IAR, IAE, IAL, IAP, FAQ, VSQ, VTM, ISM, IWQ, IFQ, IQQ, VQQ, IFM, IAM, or ISN.

[0087] 34. The AAV capsid variant of any one of embodiments 1-33, wherein [N3] is or comprises IAQ.

[0088] 35. The AAV capsid variant of any one of embodiments 1-34, wherein [N2]-[N3] comprises:

(i)
(SEQ ID NO: 5002)
DWHRIA,
(SEQ ID NO: 5003)
DWHRIY,
(SEQ ID NO: 5004)
DWHRVP,
(SEQ ID NO: 5005)
DWHRIN,
(SEQ ID NO: 5006)
DWHRVN,
(SEQ ID NO: 5007)
DWHRVY,
(SEQ ID NO: 5008)
DWHRVA,
(SEQ ID NO: 5009)
DWHRIS,
(SEQ ID NO: 5010)
DWHRIT,
(SEQ ID NO: 5011)
DWHRTA,
(SEQ ID NO: 5012)
DWHRMA,
(SEQ ID NO: 5013)
DWHRSA,
(SEQ ID NO: 5014)
DWHRIG,
(SEQ ID NO: 5015)
DWHRIE,
(SEQ ID NO: 5016)
DWHRIV,
(SEQ ID NO: 5017)
DWHRNA,
(SEQ ID NO: 5018)
DWHRLA,
(SEQ ID NO: 5019)
DWHRIP,
(SEQ ID NO: 5020)
DWHRFA,
(SEQ ID NO: 5021)
DWHRVS,
(SEQ ID NO: 5022)
DWHRVT,
(SEQ ID NO: 5023)
DWHRIW,
(SEQ ID NO: 5024)
DWHRIF,
(SEQ ID NO: 5025)
DWHRIQ,
or
(SEQ ID NO: 5026)
DWHRVQ;

[0089] (ii) an amino acid sequence comprising any portion of an amino acid sequence in (i), e.g., any 2, 3, 4, or 5 amino acids, e.g., consecutive amino acids, thereof;
[0090] (iii) an amino acid sequence comprising one, two, or three but no more than four modifications, e.g., substitutions (e.g., conservative substitutions), insertions, or deletions, relative to any of the amino acid sequences in (i); or
[0091] (iv) an amino acid sequence comprising one, two, or three but no more than four different amino acids, relative to any one of the amino acid sequences in (i).

[0092] 36. The AAV capsid variant of any one of embodiments 1-35, wherein [N2]-[N3] is or comprises:

(i)
(SEQ ID NO: 5027)
DWHRIAQ,
(SEQ ID NO: 5028)
DWHRIAG,
(SEQ ID NO: 5029)
DWHRIYQ,
(SEQ ID NO: 5030)
DWHRVPQ,
(SEQ ID NO: 5031)
DWHRIAN,
(SEQ ID NO: 5032)
DWHRINQ,
(SEQ ID NO: 5033)
DWHRVNQ,
(SEQ ID NO: 5034)
DWHRVYQ,
(SEQ ID NO: 5035)
DWHRVAN,
(SEQ ID NO: 5036)
DWHRISG,
(SEQ ID NO: 5037)
DWHRISQ,
(SEQ ID NO: 5038)
DWHRVAQ,
(SEQ ID NO: 5039)
DWHRITQ,
(SEQ ID NO: 5040)
DWHRTAQ,
(SEQ ID NO: 5041)
DWHRMAQ,
(SEQ ID NO: 5042)
DWHRSAQ,
(SEQ ID NO: 5043)
DWHRIGQ,
(SEQ ID NO: 5044)
DWHRIEQ,
(SEQ ID NO: 5045)
DWHRIVQ,
(SEQ ID NO: 5046)
DWHRNAQ,
(SEQ ID NO: 5047)
DWHRLAQ,
(SEQ ID NO: 5048)
DWHRIAK,
(SEQ ID NO: 5049)
DWHRIAH,
(SEQ ID NO: 5050)
DWHRIPQ,
(SEQ ID NO: 5051)
DWHRIAR,
(SEQ ID NO: 5052)
DWHRIAE,
(SEQ ID NO: 5053)
DWHRIAL,
(SEQ ID NO: 5054)
DWHRIAP,
(SEQ ID NO: 5055)
DWHRFAQ,
(SEQ ID NO: 5056)
DWHRVSQ,
(SEQ ID NO: 5057)
DWHRVTM,
(SEQ ID NO: 5058)
DWHRISM,
(SEQ ID NO: 5059)
DWHRIWQ,
(SEQ ID NO: 5060)
DWHRIFQ,
(SEQ ID NO: 5061)
DWHRIQQ,
(SEQ ID NO: 5062)
DWHRVQQ,
(SEQ ID NO: 5063)
DWHRIFM,
(SEQ ID NO: 5064)
DWHRIAM,
or
(SEQ ID NO: 5065)
DWHRISN;

[0093] (ii) an amino acid sequence comprising any portion of an amino acid sequence in (i), e.g., any 2, 3, 4, 5, or 6 amino acids, e.g., consecutive amino acids, thereof;
[0094] (iii) an amino acid sequence comprising one, two, or three but no more than four modifications, e.g., substitutions (e.g., conservative substitutions), insertions, or deletions, relative to any of the amino acid sequences in (i); or
[0095] (iv) an amino acid sequence comprising one, two, or three but no more than four different amino acids, relative to any one of the amino acid sequences in (i).

[0096] 37. The AAV capsid variant of any one of embodiments 1-36, wherein [N2]-[N3] is or comprises DWHRIAQ (SEQ ID NO: 5027).

[0097] 38. The AAV capsid variant of any one of embodiments 1-37, wherein [N1]-[N2]-[N3] is or comprises:
[0098] (i) the amino acid sequence of any one of SEQ ID NOs: 343-538;
[0099] (ii) an amino acid sequence comprising any portion of an amino acid sequence in (i), e.g., any 2, 3, 4, 5, 6, 7, 8, 9, or 10 amino acids, e.g., consecutive amino acids, thereof;
[0100] (iii) an amino acid sequence comprising one, two, or three but no more than four modifications, e.g., substitutions (e.g., conservative substitutions), insertions, or deletions, relative to any of the amino acid sequences in (i); or
[0101] (iv) an amino acid sequence comprising one, two, or three but no more than four different amino acids, relative to any one of the amino acid sequences in (i).

[0102] 39. The AAV capsid variant of any one of embodiments 1-38, wherein [N1]-[N2]-[N3] is or comprises TNTQDWHRIAQ (SEQ ID NO: 343).

[0103] 40. The AAV capsid variant of any one of embodiments 1-38, wherein [N1]-[N2]-[N3] is or comprises TNTKDWHRIAQ (SEQ ID NO: 344).

[0104] 41. The AAV capsid variant of any one of embodiments 1-40, which comprises one, two, three, or all of an amino acid other than T at position 593 (e.g., S, N, P, A, or I), a G at position 594 (e.g., N, D, R, V, A, S, or Q), a W at position 595 (e.g., S, C, R, L, or G), and/or a V at position 596 (e.g., A, S, I, C, G, D, F, L, or T), numbered according to SEQ ID NO: 138 or 981.

[0105] 42. The AAV capsid variant of any one of embodiments 1-40, which comprises the amino acid T at position 593, the amino acid G at position 594, the amino acid W at position 595, and the amino acid V at position 596, numbered according to SEQ ID NO: 138 or 981.

[0106] 43. The AAV capsid variant of any one of embodiments 1-42, which further comprises [N4], wherein [N4] comprises positions X₈, X₉, X₁₀, and X₁₁, wherein:
[0107] (i) position X₈ is T, S, N, P, A, or I;
[0108] (ii) position X₉ is G, N, D, R, V, A, S, or Q;
[0109] (iii) position X₁₀ is W, S, C, R, L, or G; and/or
[0110] (iv) position X₁₁ is V, A, S, I, C, G, D, F, L, or T.

[0111] 44. The AAV capsid variant of embodiment 43, wherein [N4] comprises TG, TN, SN, NN, SG, PG, TD, AG, IG, NG, TR, TV, TA, TS, SV, TQ, WV, WA, WS, WI, WC, WG, CV, RV, LV, GV, WD, WF, WL, WT, GW, NW, GS, DW, GC, GR, GL, GG, RW, VW, AW, SW, or QW.

[0112] 45. The AAV capsid variant of embodiment 43 or 44, wherein [N4] comprises TGW, TNW, SNW, NNW, SGW, PGW, TGS, TDW, TGC, TGR, TGL, TGG, AGW, IGW, NGW, TRW, TVW, TAW, TSW, SVW, TQW, GWV, GWA, NWS, NWV, NWI, GWS, GWI, GWC, GWG, GSV, DWV, GCV, GRV, GLV, GGV, GWD, GWF, RWV, VWV, GWL, AWV, SWV, GWT, or QWV.

[0113] 46. The AAV capsid variant of any one of embodiments 43-45, wherein [N4] is or comprises TGWV (SEQ ID NO: 5066), TGWA (SEQ ID NO: 5067), TNWS (SEQ ID NO: 5068), SNWV (SEQ ID NO: 5069), TNWV (SEQ ID NO: 5070), TNWI (SEQ ID NO: 5071), NNWV (SEQ ID NO: 5072), TGWS (SEQ ID NO: 5073), TGWI (SEQ ID NO: 5074), TGWC (SEQ ID NO: 5075), TGWG (SEQ ID NO: 5076), SGWV (SEQ ID NO: 5077), PGWV (SEQ ID NO: 5078), TGSV (SEQ ID NO: 5079), TDWV (SEQ ID NO: 5080), TGCV (SEQ ID NO: 5081), TGRV (SEQ ID NO: 5082), TGLV (SEQ ID NO: 5083), TGGV (SEQ ID NO: 5084), AGWV (SEQ ID NO: 5085), IGWV (SEQ ID NO: 5086), TGWD (SEQ ID NO: 5087), NGWV (SEQ ID NO: 5088), TGWF (SEQ ID NO: 5089), TRWV (SEQ ID NO: 5090), TVWV (SEQ ID NO: 5091), TGWL (SEQ ID NO: 5092), TAWV (SEQ ID NO: 5093), TSWV (SEQ ID NO: 5094), TGWT (SEQ ID NO: 5095), SVWV (SEQ ID NO: 5096), TQWV (SEQ ID NO: 5097), or PGWG (SEQ ID NO: 5098).

[0114] 47. The AAV capsid variant of any one of embodiments 43-46, wherein [N4] is or comprises TGWV (SEQ ID NO: 5066).

[0115] 48. The AAV capsid variant of any one of embodiments 43-47, wherein [N1]-[N2]-[N3]-[N4] is or comprises:
[0116] (i) the amino acid sequence of any one of SEQ ID NOs: 201-245, 247-250, 253-255, 257-265, 268-274, 276-286, 288, 290-297, 299-303, 305-309, 311, 313-319, 323-328, 330-337, 339-342, 539-542, 544, 546, 547, 549-557, 559-589, 592, 593, 595, 596, 598, 599, 601-608, 610-614, 616-622, 625, 628, 630, 631, 633, 636, 638, 639-646, 649, 651-657, 667, 669, 670, 672, 673, 679-683, 685-690, 692, 693, 695, 697, 699-701, 703-705, 708-710, 712-717, 719-723, 728-731, 733-738, 740, or 742;
[0117] (ii) an amino acid sequence comprising any portion of an amino acid sequence in (i), e.g., any 2, 3, 4, 5, 6, 7, 8, 9, 10, 11, 12, or 13 amino acids, e.g., consecutive amino acids, thereof;
[0118] (iii) an amino acid sequence comprising one, two, or three but no more than four modifications, e.g., substitutions (e.g., conservative substitutions), insertions, or deletions, relative to any of the amino acid sequences in (i); or
[0119] (iv) an amino acid sequence comprising one, two, or three but no more than four different amino acids, relative to any one of the amino acid sequences in (i).

[0120] 49. The AAV capsid variant of any one of embodiments 43-48, wherein [N1]-[N2]-[N3]-[N4] is or comprises TNTQDWHRIAQTGWV (SEQ ID NO: 201).

[0121] 50. The AAV capsid variant of any one of embodiments 43-48, wherein [N1]-[N2]-[N3]-[N4] is or comprises TNTKDWHRIAQTGWV (SEQ ID NO: 202).

[0122] 51. An AAV capsid variant (e.g., an AAV9 capsid variant) comprising an amino acid sequence having the following formula: [N1]-[N2]-[N3] (SEQ ID NO: 4683), wherein [N2] comprises the amino acid sequence of DWHR (SEQ ID NO: 4682) and wherein:
[0123] (i) [N1] comprises positions X₁, X₂, X₃, and X₄, wherein position X₄ is Q, P, or a conservative substitution thereof; and/or
[0124] (ii) [N3] comprises positions X₅, X₆, and X₇, wherein position X₅ is I, V, or a conservative substitution thereof.

[0125] 52. The AAV capsid variant of embodiment 51, which comprises the amino acid Q at position 585, numbered according to SEQ ID NO: 138 or 981.

[0126] 53. The AAV capsid variant of embodiment 51 or 52, which comprises one, two, three, or all of an amino acid other than T at position 582 (e.g., S), an amino acid other than N at position 583 (e.g., T, G, S, I, or V), an amino acid other than H at position 584 (e.g., N, I, S, A, V, or L), and/or an amino acid other than Q at position 585 (e.g., P), numbered according to SEQ ID NO: 138.

[0127] 54. The AAV capsid variant of any one of embodiments 51-53, wherein [N1] comprises positions X₁, X₂, X₃, and X₄, wherein position X₄ is Q or P.

[0128] 55. The AAV capsid variant of any one of embodiments 51, 52, or 54, wherein position X₄ is Q.

[0129] 56. The AAV capsid variant of any one of embodiments 51-55, which comprises an amino acid other than H at position 584 (e.g., T), numbered according to SEQ ID NO: 138.

[0130] 57. The AAV capsid variant of any one of embodiments 51-56, which comprises the amino acid T at position 584, numbered according to SEQ ID NO: 138 or 981.

[0131] 58. The AAV capsid variant of any one of embodiments 51-57, wherein:
[0132] (i) position X₁ is T or S;
[0133] (ii) position X₂ is N, T, G, S, I, or V; and/or
[0134] (iii) position X₃ is T, N, I, S, A, V, or L.

[0135] 59. The AAV capsid variant of any one of embodiments 51-58, wherein [N1] comprises TN, TT, TG, ST, TS, TI, TV, TQ, NQ, IQ, SQ, AQ, VQ, TP, LQ, NT, TA, NI, GT, IT, NN, TL, NS, or VT.

[0136] 60. The AAV capsid variant of any one of embodiments 51-59, wherein [N1] comprises TNT, TTN, TTI, TTS, TTT, TTA, TNI, TTV, TGT, STT, TST, TIT, TNN, TTL, TNS, TVT, NTQ, TNQ, TIQ, TSQ, TTQ, TAQ, NIQ, TVQ, GTQ, STQ, ITQ, NTP, NNQ, TLQ, NSQ, or VTQ.

[0137] 61. The AAV capsid variant of any one of embodiments 51-60, wherein [N1] is or comprises TNTQ (SEQ ID NO: 4688), TTNQ (SEQ ID NO: 4696), TTIQ (SEQ ID NO: 4698), TTSQ (SEQ ID NO: 4701), TTTQ (SEQ ID NO: 4705), TTAQ (SEQ ID NO: 4707), TNIQ (SEQ ID NO: 4714), TTVQ (SEQ ID NO: 4717), TGTQ (SEQ ID NO: 4718), STTQ (SEQ ID NO: 4761), TSTQ (SEQ ID NO: 4768), TITQ (SEQ ID NO: 4767), TNTP (SEQ ID NO: 4710), TNNQ (SEQ ID NO: 4690), TTLQ (SEQ ID NO: 4720), TNSQ (SEQ ID NO: 4731), or TVTQ (SEQ ID NO: 4790).

[0138] 62. The AAV capsid variant of any one of embodiments 51-61, wherein [N1] is or comprises TNTQ (SEQ ID NO: 4688).

[0139] 63. The AAV capsid variant of any one of embodiments 51-62, wherein [N1]-[N2] comprises:

(i)
(SEQ ID NO: 4686)
TQDWHR,
(SEQ ID NO: 4793)
NQDWHR,
(SEQ ID NO: 4797)
IQDWHR,
(SEQ ID NO: 4798)
SQDWHR,
(SEQ ID NO: 4801)
AQDWHR,
(SEQ ID NO: 4805)
VQDWHR,
(SEQ ID NO: 4803)
TPDWHR,
or
(SEQ ID NO: 4807)
LQDWHR;

[0140] (ii) an amino acid sequence comprising any portion of an amino acid sequence in (i), e.g., any 2, 3, 4, or 5 amino acids, e.g., consecutive amino acids, thereof;
[0141] (iii) an amino acid sequence comprising one, two, or three but no more than four modifications, e.g., substitutions (e.g., conservative substitutions), insertions, or deletions, relative to any of the amino acid sequences in (i); or
[0142] (iv) an amino acid sequence comprising one, two, or three but no more than four different amino acids, relative to any one of the amino acid sequences in (i).

[0143] 64. The AAV capsid variant of any one of embodiments 51-63, wherein [N1]-[N2] comprises:

(i)
(SEQ ID NO: 4827)
NTQDWHR,
(SEQ ID NO: 4832)
TNQDWHR,
(SEQ ID NO: 4834)
TIQDWHR,
(SEQ ID NO: 4836)
TSQDWHR,
(SEQ ID NO: 4840)
TTQDWHR,
(SEQ ID NO: 4842)
TAQDWHR,
(SEQ ID NO: 4848)
NIQDWHR,
(SEQ ID NO: 4850)
TVQDWHR,
(SEQ ID NO: 4851)
GTQDWHR,
(SEQ ID NO: 4884)
STQDWHR,
(SEQ ID NO: 4883)
ITQDWHR,
(SEQ ID NO: 4845)
NTPDWHR,
(SEQ ID NO: 4829)
NNQDWHR,
(SEQ ID NO: 4853)
TLQDWHR,
(SEQ ID NO: 4861)
NSQDWHR,
(SEQ ID NO: 4897)
VTQDWHR;

[0144] (ii) an amino acid sequence comprising any portion of an amino acid sequence in (i), e.g., any 2, 3, 4, 5 or 6 amino acids, e.g., consecutive amino acids, thereof;
[0145] (iii) an amino acid sequence comprising one, two, or three but no more than four modifications, e.g., substitutions (e.g., conservative substitutions), insertions, or deletions, relative to any of the amino acid sequences in (i); or
[0146] (iv) an amino acid sequence comprising one, two, or three but no more than four different amino acids, relative to any one of the amino acid sequences in (i).

[0147] 65. The AAV capsid variant of any one of embodiments 51-64, wherein [N1]-[N2] is or comprises:

(i)
(SEQ ID NO: 4898)
TNTQDWHR,
(SEQ ID NO: 4906)
TTNQDWHR,
(SEQ ID NO: 4908)
TTIQDWHR,
(SEQ ID NO: 4911)
TTSQDWHR,
(SEQ ID NO: 4915)
TTTQDWHR,
(SEQ ID NO: 4917)
TTAQDWHR,
(SEQ ID NO: 4924)
TNIQDWHR,
(SEQ ID NO: 4927)
TTVQDWHR,
(SEQ ID NO: 4928)
TGTQDWHR,
(SEQ ID NO: 4971)
STTQDWHR,
(SEQ ID NO: 4978)
TSTQDWHR,
(SEQ ID NO: 4977)
TITQDWHR,
(SEQ ID NO: 4920)
TNTPDWHR,
(SEQ ID NO: 4900)
TNNQDWHR,
(SEQ ID NO: 4930)
TTLQDWHR,
(SEQ ID NO: 4941)
TNSQDWHR,
(SEQ ID NO: 5000)
TVTQDWHR;

[0148] (ii) an amino acid sequence comprising any portion of an amino acid sequence in (i), e.g., any 2, 3, 4, 5 6, or 7 amino acids, e.g., consecutive amino acids, thereof;
[0149] (iii) an amino acid sequence comprising one, two, or three but no more than four modifications, e.g., substitutions (e.g., conservative substitutions), insertions, or deletions, relative to any of the amino acid sequences in (i); or
[0150] (iv) an amino acid sequence comprising one, two, or three but no more than four different amino acids, relative to any one of the amino acid sequences in (i).

[0151] 66. The AAV capsid variant of any one of embodiments 51-65, wherein [N1]-[N2] is or comprises TNTQDWHR (SEQ ID NO: 4898).

[0152] 67. The AAV capsid variant of any one of embodiments 51-66, which comprises one, two, or all of an amino acid other than Q at position 590 (e.g., I or V), A at position 591 (e.g., P, S, Y, or N), and/or Q at position 592 (e.g., G or N), numbered according to SEQ ID NO: 138.

[0153] 68. The AAV capsid variant of any one of embodiments 51-67, which comprises an amino acid other than Q at position 590 (e.g., I or V), numbered according to SEQ ID NO: 138.

[0154] 69. The AAV capsid variant of any one of embodiments 51-68, which comprises the amino acid I at position 590, numbered according to SEQ ID NO: 138.

[0155] 70. The AAV capsid variant of any one of embodiments 51-68, which comprises the amino acid V at position 590, numbered according to SEQ ID NO: 138.

[0156] 71. The AAV capsid variant of any one of embodiments 51-70, which comprises the amino acid A at position 591 and/or the amino acid Q at position 592, numbered according to SEQ ID NO: 138 or 981.

[0157] 72. The AAV capsid variant of any one of embodiments 51-71, [N3] comprises positions X₅, X₆, and X₁, wherein position X₅ is I or V.

[0158] 73. The AAV capsid variant of any one of embodiments 51-72, wherein position X₅ is I.

[0159] 74. The AAV capsid variant of any one of embodiments 51-73, wherein:
[0160] (i) position X₆ is A, P, S, Y, or N; and/or
[0161] (ii) position X₇ is Q, G, or N.

[0162] 75. The AAV capsid variant of any one of embodiments 51-74, wherein [N3] comprises IA, VP, VA, VS, IY, IN, IS, AQ, AG, PQ, SQ, AN, YQ, or NQ.

[0163] 76. The AAV capsid variant of any one of embodiments 51-75, wherein [N3] is or comprises IAQ, IAG, VPQ, VAQ, VSQ, IAN, IYQ, INQ, or ISQ.

[0164] 77. The AAV capsid variant of any one of embodiments 51-76, wherein [N3] is or comprises IAQ.

[0165] 78. The AAV capsid variant of any one of embodiments 51-77, wherein [N2]-[N3] comprises:

(i)
(SEQ ID NO: 5002)
DWHRIA,
(SEQ ID NO: 5004)
DWHRVP,
(SEQ ID NO: 5008)
DWHRVA,
(SEQ ID NO: 5021)
DWHRVS,
(SEQ ID NO: 5003)
DWHRIY,
(SEQ ID NO: 5005)
DWHRIN,
or
(SEQ ID NO: 5009)
DWHRIS;

[0166] (ii) an amino acid sequence comprising any portion of an amino acid sequence in (i), e.g., any 2, 3, 4, or 5 amino acids, e.g., consecutive amino acids, thereof;
[0167] (iii) an amino acid sequence comprising one, two, or three but no more than four modifications, e.g., substitutions (e.g., conservative substitutions), insertions, or deletions, relative to any of the amino acid sequences in (i); or
[0168] (iv) an amino acid sequence comprising one, two, or three but no more than four different amino acids, relative to any one of the amino acid sequences in (i).

[0169] 79. The AAV capsid variant of any one of embodiments 51-78, wherein [N2]-[N3] is or comprises:

(i)
(SEQ ID NO: 5027)
DWHRIAQ,
(SEQ ID NO: 5028)
DWHRIAG,
(SEQ ID NO: 5030)
DWHRVPQ,
(SEQ ID NO: 5038)
DWHRVAQ,
(SEQ ID NO: 5056)
DWHRVSQ,
(SEQ ID NO: 5031)
DWHRIAN,
(SEQ ID NO: 5029)
DWHRIYQ,
(SEQ ID NO: 5032)
DWHRINQ,
or
(SEQ ID NO: 5037)
DWHRISQ;

[0170] (ii) an amino acid sequence comprising any portion of an amino acid sequence in (i), e.g., any 2, 3, 4, 5, or 6 amino acids, e.g., consecutive amino acids, thereof;
[0171] (iii) an amino acid sequence comprising one, two, or three but no more than four modifications, e.g., substitutions (e.g., conservative substitutions), insertions, or deletions, relative to any of the amino acid sequences in (i); or
[0172] (iv) an amino acid sequence comprising one, two, or three but no more than four different amino acids, relative to any one of the amino acid sequences in (i).

[0173] 80. The AAV capsid variant of any one of embodiments 51-79, wherein [N2]-[N3] is or comprises DWHRIAQ (SEQ ID NO: 5027).

[0174] 81. The AAV capsid variant of any one of embodiments 51-80, wherein [N1]-[N2]-[N3] is or comprises:
[0175] (i) the amino acid sequence of any one of SEQ ID NOs: 343, 350, 352, 355, 359, 361, 364, 367, 370, 371, 373, 374, 376, 377, 378, 381, 395, 420, 454, 457, 460, 464, 481, 482, 488, 493, 494, 516, 525, 536;
[0176] (ii) an amino acid sequence comprising any portion of an amino acid sequence in (i), e.g., any 2, 3, 4, 5, 6, 7, 8, 9, or 10 amino acids, e.g., consecutive amino acids, thereof;
[0177] (iii) an amino acid sequence comprising one, two, or three but no more than four modifications, e.g., substitutions (e.g., conservative substitutions), insertions, or deletions, relative to any of the amino acid sequences in (i); or
[0178] (iv) an amino acid sequence comprising one, two, or three but no more than four different amino acids, relative to any one of the amino acid sequences in (i).

[0179] 82. The AAV capsid variant of any one of embodiments 51-81, wherein [N1]-[N2]-[N3] is or comprises TNTQDWHRIAQ (SEQ ID NO: 343).

[0180] 83. The AAV capsid variant of any one of embodiments 51-82, which comprises the amino acid W at position 595, numbered according to SEQ ID NO: 138 or 981.

[0181] 84. The AAV capsid variant of any one of embodiments 51-83, which comprises one, two or all of an amino acid other than T (e.g., S or N) at position 593, a G (e.g., N) a position 594, and/or V (e.g., A, I or S) at position 596, numbered according to SEQ ID NO: 138 or 981.

[0182] 85. The AAV capsid variant of any one of embodiments 51-84 which comprises:
[0183] (i) the amino acid T at position 593, the amino acid G at position 594, the amino acid W at position 595, and the amino acid V at position 596, numbered according to SEQ ID NO: 138 or 981;
[0184] (ii) the amino acid T at position 593, the amino acid G at position 594, the amino acid W at position 595, and the amino acid A at position 596, numbered according to SEQ ID NO: 138 or 981;
[0185] (iii) the amino acid S at position 593, the amino acid N at position 594, the amino acid W at position 595, and the amino acid V at position 596, numbered according to SEQ ID NO: 138 or 981;
[0186] (iv) the amino acid N at position 593, the amino acid N at position 594, the amino acid W at position 595, and the amino acid V at position 596, numbered according to SEQ ID NO: 138 or 981;
[0187] (v) the amino acid T at position 593, the amino acid G at position 594, the amino acid W at position 595, and the amino acid I at position 596, numbered according to SEQ ID NO: 138 or 981; or
[0188] (vi) the amino acid T at position 593, the amino acid G at position 594, the amino acid W at position 595, and the amino acid S at position 596, numbered according to SEQ ID NO: 138 or 981;

[0189] 86. The AAV capsid variant of any one of embodiments 51-85 which comprises the amino acid T at position 593, the amino acid G at position 594, the amino acid W at position 595, and the amino acid V at position 596, numbered according to SEQ ID NO: 138 or 981.

[0190] 87. The AAV capsid variant of any one of embodiments 51-86, which further comprises [N4], wherein [N4] comprises positions X₈, X₉, X₁₀, and X₁₁, wherein position X₁₀ is W.

[0191] 88. The AAV capsid variant of embodiment 87, wherein:
[0192] (i) position X₈ is T, S, or N;
[0193] (ii) position X₉ is G or N; and/or
[0194] (iv) position X₁₁ is V, A, I, or S.

[0195] 89. The AAV capsid variant of embodiment 87 or 88, wherein [N4] comprises TG, SN, NN, WV, WA, WI, WS, GW, or NW.

[0196] 90. The AAV capsid variant of any one of embodiments 87-89, wherein [N4] comprises TGW, SNW, NNW, GWV, GWA, NWV, GWI, or GWS.

[0197] 91. The AAV capsid variant of any one of embodiments 87-90, wherein [N4] is or comprises TGWV (SEQ ID NO: 5066), TGWA (SEQ ID NO: 5067), SNWV (SEQ ID NO: 5069), NNWV (SEQ ID NO: 5072), TGWI (SEQ ID NO: 5074), or TGWS (SEQ ID NO: 5073).

[0198] 92. The AAV capsid variant of any one of embodiments 87-91, wherein [N4] is or comprises TGWV (SEQ ID NO: 5066).

[0199] 93. The AAV capsid variant of any one of embodiments 87-92, wherein [N1]-[N2]-[N3]-[N4] is or comprises:
[0200] (i) the amino acid sequence of any one of SEQ ID NOs: 201, 205-209, 211-214, 216, 219, 220, 230, 232, 237, 238, 255, 262-265, 274, 283, 286, 290, 291, 293, 301, 306, 307, 308, 309, 314, or 336;
[0201] (ii) an amino acid sequence comprising any portion of an amino acid sequence in (i), e.g., any 2, 3, 4, 5, 6, 7, 8, 9, 10, 11, 12, or 13 amino acids, e.g., consecutive amino acids, thereof;
[0202] (iii) an amino acid sequence comprising one, two, or three but no more than four modifications, e.g., substitutions (e.g., conservative substitutions), insertions, or deletions, relative to any of the amino acid sequences in (i); or
[0203] (iv) an amino acid sequence comprising one, two, or three but no more than four different amino acids, relative to any one of the amino acid sequences in (i).

[0204] 94. The AAV capsid variant of any one of embodiments 87-93, wherein [N1]-[N2]-[N3]-[N4] is or comprises TNTQDWHRIAQTGWV (SEQ ID NO: 201).

[0205] 95. The AAV capsid variant of any one of embodiments 1-94, wherein [N1]-[N2]-[N3] is present in loop VIII, optionally wherein loop VIII comprises positions 580-599, numbered according to SEQ ID NO: 138 or 981.

[0206] 96. The AAV capsid variant of any one of embodiments 43-50 or 87-95, wherein [N4] is present in loop VIII, optionally wherein loop VIII comprises positions 580-599, numbered according to SEQ ID NO: 138 or 981.

[0207] 97. The AAV capsid variant of any one of embodiments 1-96, wherein [N1] replaces positions 582-585 (e.g., T582, N583, H584, Q585), numbered according to SEQ ID NO: 138.

[0208] 98. The AAV capsid variant of any one of embodiments 1-3, 5-8, 10-16, 18-21, 23-39, 42-49, 51-69, 71-83, or 85-97, wherein [N1] corresponds to positions 582-585 (e.g., T582, N583, T584, Q585) of SEQ ID NO: 981.

[0209] 99. The AAV capsid variant of any one of embodiments 1-98, wherein [N1] is present at positions 582-585, numbered according to SEQ ID NO: 138 or 981.

[0210] 100. The AAV capsid variant of any one of embodiments 1-99, wherein [N1] corresponds to positions 582-585 (e.g., T582, N583, T584, Q585) of SEQ ID NO: 138.

[0211] 101. The AAV capsid variant of any one of embodiments 1-100, wherein [N2] replaces positions 586-589 (e.g., S586, A587, Q588, A589), numbered according to the amino acid sequence of SEQ ID NO: 138.

[0212] 102. The AAV capsid variant of any one of embodiments 1-3, 5-8, 10-16, 18-21, 23-39, 42-49, 51-69, 71-83, 85-99, or 101, wherein [N2] corresponds to positions 586-589 (e.g., D586, W587, H588, R589) of SEQ ID NO: 981.

[0213] 103. The AAV capsid variant of any one of embodiments 1-102, wherein [N2] is present at positions 586-589, numbered according to SEQ ID NO: 138 or 981.

[0214] 104. The AAV capsid variant of any one of embodiments 1-103, wherein [N1]-[N2] replaces to positions 582-589 (e.g., T582, N583, H584, Q585, S586, A587, Q588, A589), numbered according to SEQ ID NO: 138.

[0215] 105. The AAV capsid variant of any one of embodiments 1-3, 5-8, 10-16, 18-21, 23-39, 42-49, 51-69, 71-83, 85-99, or 101-104, wherein [N1]-[N2] corresponds to positions 582-589 (e.g., T582, N583, T584, Q585, D586, W587, H588, R589) of SEQ ID NO: 981.

[0216] 106. The AAV capsid variant of any one of embodiments 1-105, wherein [N1]-[N2] is present at positions 582-589, numbered according to SEQ ID NO: 138 or 981.

[0217] 107. The AAV capsid variant of any one of embodiments 1-106, wherein [N3] replaces positions 590-592 (e.g., Q590, A591, and Q592), relative to a reference sequence numbered according to the amino acid sequence of SEQ ID NO: 138.

[0218] 108. The AAV capsid variant of any one of embodiments 1-3, 5-8, 10-16, 18-21, 23-39, 42-49, 51-69, 71-83, 85-99, or 101-107, wherein [N3] corresponds to positions 590-592 (e.g., 1590, A591, and Q592) of SEQ ID NO: 981.

[0219] 109. The AAV capsid variant of any one of embodiments 1-108, wherein [N3] is present at positions 590-592, numbered according to SEQ ID NO: 138 or 981.

[0220] 110. The AAV capsid variant of any one of embodiments 1-109, wherein [N2]-[N3] replaces positions 586-592 (e.g., S586, A587, Q588, A589, Q590, A591, and Q592), numbered according to SEQ ID NO: 138.

[0221] 111. The AAV capsid variant of any one of embodiments 1-3, 5-8, 10-16, 18-21, 23-39, 42-49, 51-69, 71-83, 85-99, or 101-110, wherein [N2]-[N3] corresponds to positions 586-592 (e.g., D586, W587, H588, R589, 1590, A591, and Q592) of SEQ ID NO: 981.

[0222] 112. The AAV capsid variant of any one of embodiments 1-111, wherein [N2]-[N3] is present at positions 586-592, numbered according to SEQ ID NO: 138 or 981.

[0223] 113. The AAV capsid variant of any one of embodiments 1-112, wherein [N1]-[N2]-[N3] replaces positions 582-592 (e.g., T582, N583, H584, Q585, S586, A587, Q588, A589, Q590, A591, Q592), numbered according to SEQ ID NO: 138.

[0224] 114. The AAV capsid variant of any one of embodiments 1-3, 5-8, 10-16, 18-21, 23-39, 42-49, 51-69, 71-83, 85-99, or 101-113, wherein [N1]-[N2]-[N3] corresponds to positions 582-592 (e.g., T582, N583, T584, Q585, D586, W587, H588, R589, 1590, A591, Q592) of SEQ ID NO: 981.

[0225] 115. The AAV capsid variant of any one of embodiments 1-114, wherein [N1]-[N2]-[N3] is present at positions 582-592, numbered according to SEQ ID NO: 138 or 981.

[0226] 116. The AAV capsid variant of any one of embodiments 43-50 or 87-115, wherein [N4] replaces positions 593-596 (e.g., T593, G594, W595, and V596), numbered according to SEQ ID NO: 138.

[0227] 117. The AAV capsid variant of any one of embodiments 43-49 or 87-115, wherein [N4] corresponds to positions 593-596 (e.g., T593, G594, W595, and V596) of SEQ ID NO: 138 or 981.

[0228] 118. The AAV capsid variant of any one of embodiments 43-50 or 87-117, wherein [N4] is present at positions 593-596, numbered according to SEQ ID NO: 138 or 981.

[0229] 119. The AAV capsid variant of any one of embodiments 43-50 or 87-118, wherein [N2]-[N3]-[N4] replaces positions 586-596 (e.g., S586, A587, Q588, A589, Q590, A591, Q592, T593, G594, W595, and V596), relative to a reference sequence numbered according to the amino acid sequence of SEQ ID NO: 138.

[0230] 120. The AAV capsid variant of any one of embodiments 43-49 or 87-119, wherein [N2]-[N3]-[N4] corresponds to positions 586-596 (e.g., D586, W587, H588, R589, 1590, A591, Q592, T593, G594, W595, and V596) of SEQ ID NO: 981.

[0231] 121. The AAV capsid variant of any one of embodiments 43-50 or 87-120, wherein [N2]-[N3]-[N4] is present at positions 586-596, numbered according to SEQ ID NO: 138 or 981.

[0232] 122. The AAV capsid variant of any one of embodiments 43-50 or 87-121, wherein [N1]-[N2]-[N3]-[N4] replaces positions 582-596 (e.g., T582, N583, H584, Q585, S586, A587, Q588, A589, Q590, A591, Q592, T593, G594, W595, and V596), numbered according to the amino acid sequence of SEQ ID NO: 138.

[0233] 123. The AAV capsid variant of any one of embodiments 43-49 or 87-122, wherein [N1]-[N2]-[N3]-[N4] corresponds to positions 582-596 (e.g., T582, N583, T584, Q585, D586, W587, H588, R589, 1590, A591, Q592, T593, G594, W595, and V596) of SEQ ID NO: 981.

[0234] 124. The AAV capsid variant of any one of embodiments 43-50 or 87-123, wherein [N1]-[N2]-[N3]-[N4] is present at positions 582-596, numbered according to the amino acid sequence of SEQ ID NO: 138 or 981.

[0235] 125. The AAV capsid variant of any one of embodiments 1-124, wherein [N2] is present immediately subsequent to [N1].

[0236] 126. The AAV capsid variant of any one of embodiments 1-125, wherein [N3] is present immediately subsequent to [N2].

[0237] 127. The AAV capsid variant of any one of embodiments 43-50 or 87-126, wherein [N3] is present immediately subsequent to [N4].

[0238] 128. The AAV capsid variant of any one of embodiments 1-127, which comprises from N-terminus to C-terminus, [N1]-[N2]-[N3].

[0239] 129. The AAV capsid variant of any one of embodiments 43-50 or 87-128, which comprises from N-terminus to C-terminus, [N1]-[N2]-[N3]-[N4].

[0240] 130. An AAV capsid variant (e.g., an AAV9 capsid variant) comprising:
[0241] (a) the amino acid sequence of any of the sequences provided in Tables 1, 2A, 2B, 9, 14, 15, or 16;
[0242] (b) an amino acid sequence comprising at least 3, 4, 5, 6, 7, 8, 9, 10, 11, 12, 13, or 14 consecutive amino acids from any one of the sequences provided in Tables 1, 2A, 2B, 9, 14, 15, or 16; or
[0243] (c) an amino acid sequence comprising at least one, two, or three but no more than four different amino acids, relative to any one of the sequences provided in Tables 1, 2A, 2B, 9, 14, 15, or 16; or
[0244] (d) an amino acid sequence comprising at least one, two, or three but no more than four modifications, e.g., substitutions (e.g., conservative substitutions), relative to the amino acid sequence of any one of the sequences provided in Tables 1, 2A, 2B, 9, 14, 15, or 16.

[0245] 131. An AAV capsid variant (e.g., an AAV9 capsid variant) comprising:
[0246] (a) the amino acid sequence of any of SEQ ID NOs: 201, 205-209, 211-214, 216, 219, 220, 230, 232, 237, 238, 255, 262-265, 274, 283, 286, 290, 291, 293, 301, 306, 307, 308, 309, 314, or 336;
[0247] (b) an amino acid sequence comprising at least 3, 4, 5, 6, 7, 8, 9, 10, 11, 12, 13, or 14 consecutive amino acids from any one of SEQ ID NOs: 201, 205-209, 211-214, 216, 219, 220, 230, 232, 237, 238, 255, 262-265, 274, 283, 286, 290, 291, 293, 301, 306, 307, 308, 309, 314, or 336;
[0248] (c) an amino acid sequence comprising at least one, two, or three but no more than four different amino acids, relative to the amino acid sequence of any one of SEQ ID NOs: 201, 205-209, 211-214, 216, 219, 220, 230, 232, 237, 238, 255, 262-265, 274, 283, 286, 290, 291, 293, 301, 306, 307, 308, 309, 314, or 336; or
[0249] (d) an amino acid sequence comprising at least one, two, or three but no more than four modifications, e.g., substitutions (e.g., conservative substitutions), relative to the amino acid sequence of any one of SEQ ID NOs: 201, 205-209, 211-214, 216, 219, 220, 230, 232, 237, 238, 255, 262-265, 274, 283, 286, 290, 291, 293, 301, 306, 307, 308, 309, 314, or 336.

[0250] 132. The AAV capsid variant of embodiment 130 or 131, wherein the AAV capsid variant does not comprise at least 3, 4, 5, 6, 7, 8, or 9 consecutive amino acids from TNHQSAQAQ (SEQ ID NO: 5100), optionally wherein the TNHQSAQAQ (SEQ ID NO: 5100) corresponds to positions 582-592 of SEQ ID NO: 138.

[0251] 133. The AAV capsid variant of any one of embodiments 130-132, wherein the AAV capsid variant does not comprise: TNH, TNHQ (SEQ ID NO: 4760), TNHQS (SEQ ID NO: 5101), TNHQSA (SEQ ID NO: 5102), TNHQSAQ (SEQ ID NO: 5103), TNHQSAQA (SEQ ID NO: 5104), TNHQSAQAQ (SEQ ID NO: 5100), NHQ, NHQS (SEQ ID NO: 5105), NHQSA (SEQ ID NO: 5106), NHQSAQ (SEQ ID NO: 5107), NHQSAQA (SEQ ID NO: 5108), NHQSAQAQ (SEQ ID NO: 5109), HQS, HQSA (SEQ ID NO: 5110), HQSAQ (SEQ ID NO: 5111), HQSAQA (SEQ ID NO: 5112), HQSAQAQ (SEQ ID NO: 5113), QSA, QSAQ (SEQ ID NO: 5114), QSAQA (SEQ ID NO: 5115), QSAQAQ (SEQ ID NO: 5116), SAQA (SEQ ID NO: 5117), or SAQAQ (SEQ ID NO: 5118).

[0252] 134. The AAV capsid variant of any one of embodiments 130-124, which comprises an amino acid sequence comprising at least 3, 4, 5, 6, 7, 8, 9, 10, 11, 12, 13, or 14 consecutive amino acids from any one of SEQ ID NOs: 201, 205-209, 211-214, 216, 219, 220, 230, 232, 237, 238, 255, 262-265, 274, 283, 286, 290, 291, 293, 301, 306, 307, 308, 309, 314, or 336.

[0253] 135. The AAV capsid variant of any one of embodiments 130-134, wherein the 3 consecutive amino acids comprise TQD.

[0254] 136. The AAV capsid variant of any one of embodiments 130-135, wherein the 4 consecutive amino acids comprise TQDW (SEQ ID NO: 4684).

[0255] 137. The AAV capsid variant of any one of embodiments 130-136, wherein the 5 consecutive amino acids comprise TQDWH (SEQ ID NO: 4685).

[0256] 138. The AAV capsid variant of any one of embodiments 130-137, wherein the 6 consecutive amino acids comprise TQDWHR (SEQ ID NO: 4686).

[0257] 139. The AAV capsid variant of embodiment 130-138, wherein the 7 consecutive amino acids comprise TQDWHRI (SEQ ID NO: 941).

[0258] 140. The AAV capsid variant of any one of embodiments 130-134, wherein the 3 consecutive amino acids comprise TNT.

[0259] 141. The AAV capsid variant of any one of embodiments 130-134 or 140, wherein the 4 consecutive amino acids comprise TNTQ (SEQ ID NO: 4688).

[0260] 142. The AAV capsid variant of any one of embodiments 130-134, 140, or 141, wherein the 5 consecutive amino acids comprise TNTQD (SEQ ID NO: 5119).

[0261] 143. The AAV capsid variant of any one of embodiments 130-134 or 140-142, wherein the 6 consecutive amino acids comprise TNTQDW (SEQ ID NO: 5120).

[0262] 144. The AAV capsid variant of embodiment 130-134 or 140-143, wherein the 7 consecutive amino acids comprise TNTQDWH (SEQ ID NO: 5121).

[0263] 145. The AAV capsid variant of any one of embodiments 130-134 or 140-144, wherein the 8 consecutive amino acids comprise TNTQDWHR (SEQ ID NO: 4898).

[0264] 146. The AAV capsid variant of any one of embodiments 130-134 or 140-145, wherein the 9 consecutive amino acids comprise TNTQDWHRI (SEQ ID NO: 746).

[0265] 147. The AAV capsid variant of any one of embodiments 130-146, which comprises an amino acid sequence comprising at least one, two, or three but no more than four modifications, e.g., substitutions (e.g., conservative substitutions), relative to the amino acid sequence of any one of SEQ ID NOs: 201, 205-209, 211-214, 216, 219, 220, 230, 232, 237, 238, 255, 262-265, 274, 283, 286, 290, 291, 293, 301, 306, 307, 308, 309, 314, or 336.

[0266] 148. The AAV capsid variant of any one of embodiments 130-147, which comprises an amino acid sequence comprising at least one, two, or three but no more than four modifications, e.g., substitutions (e.g., conservative substitutions), relative to the amino acid sequence of TQDWHRI (SEQ ID NO: 941).

[0267] 149. The AAV capsid variant of any one of embodiments 130-147, which comprises an amino acid sequence comprising at least one, two, or three but no more than four modifications, e.g., substitutions (e.g., conservative substitutions), relative to the amino acid sequence of TNTQDWHRI (SEQ ID NO: 746).

[0268] 150. The AAV capsid variant of any one of embodiments 130-149, which comprises an amino acid sequence comprising at least one, two, or three but no more than four modifications, e.g., substitutions (e.g., conservative substitutions), relative to the amino acid sequence of ATNTQDWHRIAQT (SEQ ID NO: 744).

[0269] 151. The AAV capsid variant of any one of embodiments 130-150, which comprises an amino acid sequence comprising at least one, two, or three but no more than four different amino acids relative to the amino acid sequence of any one of SEQ ID NOs: 201, 205-209, 211-214, 216, 219, 220, 230, 232, 237, 238, 255, 262-265, 274, 283, 286, 290, 291, 293, 301, 306, 307, 308, 309, 314, or 336.

[0270] 152. The AAV capsid variant of any one of embodiments 130-149 or 151, which comprises an amino acid sequence comprising at least one, two, or three but no more than four different amino acids relative to the amino acid sequence of TQDWHRI (SEQ ID NO: 941).

[0271] 153. The AAV capsid variant of any one of embodiments 130-149, 151, or 152, which comprises an amino acid sequence comprising at least one, two, or three but no more than four different amino acids relative to relative to the amino acid sequence of TNTQDWHRI (SEQ ID NO: 746).

[0272] 154. The AAV capsid variant of any one of embodiments 130-153, which comprises an amino acid sequence comprising at least one, two, or three but no more than four different amino acids relative to relative to the amino acid sequence of ATNTQDWHRIAQT (SEQ ID NO: 744).

[0273] 155. The AAV capsid variant of any one of embodiments 1-154, which comprises the amino acid sequence of any of SEQ ID NOs: 201, 205-209, 211-214, 216, 219, 220, 230, 232, 237, 238, 255, 262-265, 274, 283, 286, 290, 291, 293, 301, 306, 307, 308, 309, 314, or 336.

[0274] 156. The AAV capsid variant of any one of embodiments 1-3, 5-8, 10-16, 18-21, 23-39, 42-49, 51-69, 71-83, 85-99, or 101-155, which comprises the amino acid sequence of TQDWHRI (SEQ ID NO: 941), optionally wherein the amino acid sequence replaces positions 584-590, numbered according to SEQ ID NO: 138.

[0275] 157. The AAV capsid variant of any one of embodiments 1-3, 5-8, 10-16, 18-21, 23-39, 42-49, 51-69, 71-83, 85-99, or 101-156, which comprises the amino acid sequence of TQDWHRI (SEQ ID NO: 941), optionally wherein the amino acid sequence corresponds to positions 584-590 of SEQ ID NO: 981.

[0276] 158. The AAV capsid variant of any one of embodiments 1-3, 5-8, 10-16, 18-21, 23-39, 42-49, 51-69, 71-83, 85-99, or 101-149, 151-153, or 155-157, comprising an amino acid sequence encoded by: the nucleotide sequence of SEQ ID NO: 942; a nucleotide sequence comprising at least one, two, three, four, five, six, or seven modifications, e.g., substitutions, but no more than ten modifications, e.g., substitutions, relative to the nucleotide sequence of SEQ ID NO: 942; or a nucleotide sequence comprising at least one, two, three, four, five, six, or seven, but no more than ten different nucleotides relative to the nucleotide sequence of SEQ ID NO: 942.

[0277] 159. The AAV capsid variant of any one of embodiments 1-3, 5-8, 10-16, 18-21, 23-39, 42-49, 51-69, 71-83, 85-99, or 101-158, comprising an amino acid sequence encoded by: the nucleotide sequence of SEQ ID NO: 747; a nucleotide sequence comprising at least one, two, three, four, five, six, or seven modifications, e.g., substitutions, but no more than ten modifications, e.g., substitutions, relative to the nucleotide sequence of SEQ ID NO: 747; or a nucleotide sequence comprising at least one, two, three, four, five, six, or seven, but no more than ten different nucleotides relative to the nucleotide sequence of SEQ ID NO: 747.

[0278] 160. The AAV capsid variant of any one of embodiments 1-3, 5-8, 10-16, 18-21, 23-39, 42-49, 51-69, 71-83, 85-99, or 101-149, 151-153, or 155-158, wherein the nucleotide sequence encoding the capsid variant comprises the nucleotide sequence of SEQ ID NO: 942; a nucleotide sequence comprising at least one, two, three, four, five, six, or seven modifications, e.g., substitutions, but no more than ten modifications, e.g., substitutions, relative to the nucleotide sequence of SEQ ID NO: 942; or a nucleotide sequence comprising at least one, two, three, four, five, six, or seven, but no more than ten different nucleotides relative to the nucleotide sequence of SEQ ID NO: 942.

[0279] 161. The AAV capsid variant of any one of embodiments 1-3, 5-8, 10-16, 18-21, 23-39, 42-49, 51-69, 71-83, 85-99, or 101-160, wherein the nucleotide sequence encoding the capsid variant comprises the nucleotide sequence of SEQ ID NO: 747; a nucleotide sequence comprising at least one, two, three, four, five, six, or seven modifications, e.g., substitutions, but no more than ten modifications, e.g., substitutions, relative to the nucleotide sequence of SEQ ID NO: 747; or a nucleotide sequence comprising at least one, two, three, four, five, six, or seven, but no more than ten different nucleotides relative to the nucleotide sequence of SEQ ID NO: 747.

[0280] 162. The AAV capsid variant of any one of embodiments 130-161, wherein the amino acid sequence is present in loop VIII, optionally wherein loop VIII comprises positions 580-599, numbered according to SEQ ID NO: 138 or 981.

[0281] 163. The AAV capsid variant of any one of embodiments 130-153, wherein the amino acid sequence replaces positions 584, 585, 586, 587, 588, 589, and/or 590 (e.g., H584, Q585, S586, A587, Q588, A589, and/or Q590), numbered according to the amino acid sequence of SEQ ID NO: 138.

[0282] 164. The AAV capsid variant of any one of embodiments 130-163, wherein the amino acid sequence is present at positions 584, 585, 586, 587, 588, 589, and/or 590, numbered according to the amino acid sequence of SEQ ID NO: 138 or 981.

[0283] 165. The AAV capsid variant of any one of embodiments 130-164, wherein the amino acid sequence corresponds to positions 584-590 (e.g., T584, Q585, D586, W587, H588, R589, and/or I590), numbered according to the amino acid sequence of SEQ ID NO: 981.

[0284] 166. The AAV capsid variant of any one of embodiments 121-165, wherein the amino acid sequence replaces positions 582, 583, 584, 585, 586, 587, 588, 589, and/or 590 (e.g., T582, N583, H584, Q585, S586, A587, Q588, A589, and/or Q590), numbered according to the amino acid sequence of SEQ ID NO: 138.

[0285] 167. The AAV capsid variant of any one of embodiments 121-166, wherein the amino acid sequence is present at positions 582, 583, 584, 585, 586, 587, 588, 589, and/or 590, numbered according to the amino acid sequence of SEQ ID NO: 138 or 981.

[0286] 168. The AAV capsid variant of any one of embodiments 121-167, wherein the amino acid sequence replaces positions 582, 583, 584, 585, 586, 587, 588, 589, 590, 591, 592, 593, 594, 595, and/or 596 (e.g., T582, N583, H584, Q585, S586, A587, Q588, A589, Q590, A591, Q592, T593, G594, W595, and/or V5965), numbered according to the amino acid sequence of SEQ ID NO: 138.

[0287] 169. The AAV capsid variant of any one of embodiments 121-168, wherein the amino acid sequence is present at positions 582, 583, 584, 585, 586, 587, 588, 589, 590, 591, 592, 593, 594, 595, and/or 596, numbered according to the amino acid sequence of SEQ ID NO: 138 or 981.

[0288] 170. The AAV capsid variant of any one of embodiments 1-169, which comprises one, two, three, four, five or all of an amino acid other than H at position 584 (e.g., T), S at position 586 (e.g., D), A at position 587 (e.g., W), Q at position 588 (e.g., H), A at position 589 (e.g., R), and/or Q at position 590 (e.g., I), numbered according to SEQ ID NO: 138.

[0289] 171. An AAV capsid variant (e.g., an AAV9 capsid variant) comprising one, two, three, four, five or all of an amino acid other than H at position 584 (e.g., T), S at position 586 (e.g., D), A at position 587 (e.g., W), Q at position 588 (e.g., H), A at position 589 (e.g., R), and/or Q at position 590 (e.g., I), numbered according to SEQ ID NO: 138.

[0290] 172. The AAV capsid variant of any one of embodiments 1-171, which comprises one, two, three, four, five or all of the amino acid T at position 584, D at position 586, W at position 587, H at position 588, R at position 589, and/or I at position 590, numbered according to SEQ ID NO: 138 or 981.

[0291] 173. An AAV capsid variant (e.g., an AAV9 capsid variant) comprising one, two, three, four, five or all of the amino acid T at position 584, D at position 586, W at position 587, H at position 588, R at position 589, and/or I at position 590, numbered according to SEQ ID NO: 138 or 981.

[0292] 174. The AAV capsid variant of any one of embodiments 1-173, which comprises one, two, three, four, five or all of the substitutions H584T, S586D, A587W, Q588H, A589R, and/or Q590I, numbered according to SEQ ID NO: 138.

[0293] 175. An AAV capsid variant (e.g., an AAV9 capsid variant) comprising one, two, three, four, five or all of the substitutions H584T, S586D, A587W, Q588H, A589R, and/or Q590I, numbered according to SEQ ID NO: 138.

[0294] 176. The AAV capsid variant of any one of embodiments 1-175, which comprises an amino acid other than H at position 584 (e.g., T), S at position 586 (e.g., D), A at position 587 (e.g., W), Q at position 588 (e.g., H), A at position 589 (e.g., R), and Q at position 590 (e.g., I), numbered according to SEQ ID NO: 138.

[0295] 177. The AAV capsid variant of any one of embodiments 1-176, which comprises the amino acid T at position 584, D at position 586, W at position 587, H at position 588, R at position 589, and I at position 590, numbered according to SEQ ID NO: 138 or 981.

[0296] 178. The AAV capsid variant of any one of embodiments 1-3, 5-8, 10-16, 18-21, 23-39, 42-49, 51-69, 71-83, 85-98, or 100-164, which corresponds to positions 584, 586, 587, 588, 589, and 590 of SEQ ID NO: 981.

[0297] 179. The AAV capsid variant of any one of embodiments 1-3, 5-8, 10-16, 18-21, 23-39, 42-49, 51-69, 71-83, 85-99, or 101-178, which corresponds to positions 582, 583, 584, 586, 587, 588, 589, and 590 of SEQ ID NO: 981.

[0298] 180. The AAV capsid variant of any one of embodiments 1-3, 5-8, 10-16, 18-21, 23-39, 42-49, 51-69, 71-83, 85-99, or 101-179, which corresponds to positions 582, 583, 584, 586, 587, 588, 589, 590, 591, 592, 593, 594, 595, and 596 of SEQ ID NO: 981.

[0299] 181. The AAV capsid variant of any one of embodiments 1-181, which comprises the substitutions H584T, S586D, A587W, Q588H, A589R, and Q590I, numbered according to SEQ ID NO: 138.

[0300] 182. An AAV capsid variant (e.g., an AAV9 capsid variant) comprising the amino acid T at position 584, D at position 586, W at position 587, H at position 588, R at position 589, and I at position 590, numbered according to SEQ ID NO: 138 or 981.

[0301] 183. An AAV capsid variant (e.g., an AAV9 capsid variant) comprising the substitutions H584T, S586D, A587W, Q588H, A589R, and Q590I, numbered according to SEQ ID NO: 138.

[0302] 184. The AAV capsid variant of any one of embodiments 1-183, which further comprises an amino acid other than A position 581, numbered according to SEQ ID NO: 138 or 981.

[0303] 185. The AAV capsid of any one of embodiments 1-184, which further comprises a T at position 581 or a V at position 581, numbered according to SEQ ID NO: 138 or 981.

[0304] 186. The AAV capsid variant of any one of embodiments 1-185, which comprises the substitutions A581T or A581V, numbered according to SEQ ID NO: 138 or 981.

[0305] 187. The AAV capsid variant of any one of embodiments 1, 3-7, 9-15, 17-20, 22-38, 40-48, 50, 130-134, 147, 151, 155, 162, 163, 166-177, or 181-186, which comprises an amino acid other than Q at position 585, numbered according to SEQ ID NO: 138.

[0306] 188. The AAV capsid variant of any one of embodiments 1, 3-7, 9-15, 17-20, 22-38, 40-48, 50, 130-134, 147, 151, 155, 162, 163, 166-177, 181-187, which comprises the amino acid K at position 585, numbered according to SEQ ID NO: 138.

[0307] 189. The AAV capsid variant of any one of the preceding embodiments, which further comprises:
[0308] (i) a modification, e.g., an insertion, substitution (e.g., conservative substitution), and/or deletion, in loop I, II, IV, and/or VI; and/or
[0309] (ii) a substitution at position K449, e.g., a K449R substitution, numbered according to SEQ ID NO: 138.

[0310] 190. The AAV capsid variant of any one of the preceding embodiments, which comprises an amino acid sequence comprising at least one, two or three modifications, e.g., substitutions (e.g., conservative substitutions), but not more than 30, 20 or 10 modifications, e.g., substitutions (e.g., conservative substitutions), relative to the amino acid sequence of SEQ ID NO: 138.

[0311] 191. The AAV capsid variant of any one of the preceding embodiments, which comprises an amino acid sequence comprising at least one, two or three, but no more than 30, 20 or 10 different amino acids relative to the amino acid sequence of SEQ ID NO: 138.

[0312] 192. The AAV capsid variant of any one of the preceding embodiments, which comprises the amino acid sequence of SEQ ID NO: 138, or an amino acid sequence with at least 80% (e.g., at least 85, 90, 95, 96, 97, 98, or 99%) sequence identity thereto.

[0313] 193. The AAV capsid variant of any one of the preceding embodiments, which comprises the amino acid sequence of SEQ ID NO: 138.

[0314] 194. The AAV capsid variant of any one of the preceding embodiments, which comprises an amino acid sequence encoded by the nucleotide sequence of SEQ ID NO: 137, or a sequence with at least 80% (e.g., at least 85, 90, 95, 96, 97, 98, or 99%) sequence identity thereto.

[0315] 195. The AAV capsid variant of any one of the preceding embodiments, wherein the nucleotide sequence encoding the capsid variant comprises the nucleotide sequence of SEQ ID NO: 137, or a sequence with at least 80% (e.g., at least 85, 90, 95, 96, 97, 98, or 99%) sequence identity thereto.

[0316] 196. The AAV capsid variant of any one of the preceding embodiments, which comprises a VP1 protein, a VP2 protein, a VP3 protein, or a combination thereof.

[0317] 197. The AAV capsid variant of any one of embodiments 1-196, which comprises the amino acid sequence corresponding to positions 138-736, e.g., a VP2, of SEQ ID NO: 981, or a sequence with at least 80% (e.g., at least 85, 90, 95, 96, 97, 98, or 99%) sequence identity thereto.

[0318] 198. The AAV capsid variant of any one of embodiments 1-197, which comprises the amino acid sequence corresponding to positions 203-736, e.g., a VP3, of SEQ ID NO: 981, or a sequence with at least 80% (e.g., at least 85, 90, 95, 96, 97, 98, or 99%) sequence identity thereto.

[0319] 199. The AAV capsid variant of any one of embodiments 1-198, which comprises the amino acid sequence corresponding to positions 138-736, e.g., a VP2, of SEQ ID NO: 138, or a sequence with at least 80% (e.g., at least 85, 90, 95, 96, 97, 98, or 99%) sequence identity thereto.

[0320] 200. The AAV capsid variant of any one of embodiments 1-199, which comprises the amino acid sequence corresponding to positions 203-736, e.g., a VP3, of SEQ ID NO: 138, or a sequence with at least 80% (e.g., at least 85, 90, 95, 96, 97, 98, or 99%) sequence identity thereto.

[0321] 201. The AAV capsid variant of any one of embodiments 1-3, 5-8, 10-16, 18-21, 23-39, 42-49, 51-69, 71-83, 85-99, 101-186, or 189-200, comprising an amino acid sequence comprising at least 3, 4, 5, 6, or 7 consecutive amino acids from the amino acid sequence of TQDWHRI (SEQ ID NO: 941), wherein:
[0322] (i) the 3 consecutive amino acids comprise TQD;
[0323] (ii) the 4 consecutive amino acids comprise TQDW (SEQ ID NO: 4684);
[0324] (iii) the 5 consecutive amino acids comprise TQDWH (SEQ ID NO: 4685);
[0325] (iv) the 6 consecutive amino acids comprise TQDWHR (SEQ ID NO: 4686); or
[0326] (v) the 7 consecutive amino acids comprise TQDWHRI (SEQ ID NO: 941);
[0327] wherein the AAV capsid variant comprises: (a) a VP1 protein comprising the amino acid sequence of SEQ ID NO: 138 or SEQ ID NO: 981; (b) a VP2 protein comprising the amino acid sequence of positions 138-736 of SEQ ID NO: 138 or positions 138-736 of SEQ ID NO: 981; (c) a VP3 protein comprising the amino acid sequence of positions 203-736 of SEQ ID NO: 138 or positions 203-736 of SEQ ID NO: 981; or (d) an amino acid sequence with at least 80% (e.g., at least 85, 90, 95, 96, 97, 98, or 99%) sequence identity to any of the amino acid sequences in (a)-(c).

[0328] 202. The AAV capsid variant of any one of embodiments 1-3, 5-8, 10-16, 18-21, 23-39, 42-49, 51-69, 71-83, 85-99, 101-186, or 189-201, comprising an amino acid sequence comprising at least 3, 4, 5, 6, 3, 4, 5, 6, or 7 consecutive amino acids from the amino acid sequence of TQDWHRI (SEQ ID NO: 941), wherein:
[0329] (i) the 3 consecutive amino acids comprise TQD;
[0330] (ii) the 4 consecutive amino acids comprise TQDW (SEQ ID NO: 4684);
[0331] (iii) the 5 consecutive amino acids comprise TQDWH (SEQ ID NO: 4685);
[0332] (iv) the 6 consecutive amino acids comprise TQDWHR (SEQ ID NO: 4686); or
[0333] (v) the 7 consecutive amino acids comprise TQDWHRI (SEQ ID NO: 941);
[0334] wherein the AAV capsid variant comprises an amino acid sequence at least 80% (e.g., at least 85, 90, 95, 96, 97, 98, or 99%) identical to the amino acid sequence of SEQ ID NO: 981.

[0335] 203. The AAV capsid variant of any one of embodiments 11-3, 5-8, 10-16, 18-21, 23-39, 42-49, 51-69, 71-83, 85-99, 101-186, or 189-202, comprising one or two, but no more than three substitutions relative to the amino acid sequence of TQDWHRI (SEQ ID NO: 941), wherein the AAV capsid variant comprises an amino acid sequence at least 90% (e.g., at least 95, 96, 97, 98, or 99%) identical to the amino acid sequence of SEQ ID NO: 138 or SEQ ID NO: 981.

[0336] 204. The AAV capsid variant of any one of embodiments 1-203, which comprises the amino acid sequence of any one of SEQ ID NO: 981, or an amino acid sequence with at least 80% (e.g., at least 85, 90, 95, 96, 97, 98, or 99%) sequence identity thereto.

[0337] 205. The AAV capsid variant of any one of embodiments 1-204, which comprises an amino acid sequence comprising at least one, two or three modifications, e.g., substitutions (e.g., conservative substitutions), but not more than 30, 20 or 10 modifications, e.g., substitutions (e.g., conservative substitutions), relative to the amino acid sequence of SEQ ID NO: 981.

[0338] 206. The AAV capsid variant of any one of embodiments, 1-205, which comprises an amino acid sequence comprising at least one, two or three, but not more than 30, 20 or 10 different amino acids, relative to the amino acid sequence of SEQ ID NO: 981.

[0339] 207. The AAV capsid variant of any one of embodiments 1-206, which comprises an amino acid sequence encoded by the nucleotide sequence of SEQ ID NO: 983, or a nucleotide sequence with at least 80% (e.g., at least 85, 90, 95, 96, 97, 98, or 99%) sequence identity thereto.

[0340] 208. The AAV capsid variant of any one of the preceding embodiments 1-207, wherein the nucleotide sequence encoding the capsid variant comprises the nucleotide sequence of SEQ ID NO: 983, or a nucleotide sequence with at least 80% (e.g., at least 85, 90, 95, 96, 97, 98, or 99%) sequence identity thereto.

[0341] 209. The AAV capsid variant of any one of the preceding embodiments, wherein the nucleotide sequence encoding the capsid variant is codon optimized.

[0342] 210. An AAV capsid variant (e.g., an AAV9 capsid variant) comprising the amino acid sequence of any one of embodiments 1-3, 5-8, 10-16, 18-21, 23-39, 42-49, 51-69, 71-83, 85-99, 101-186, or 189, and further comprising an amino acid sequence at least 95% identical to SEQ ID NO: 981.

[0343] 211. An AAV capsid variant (e.g., an AAV9 capsid variant) comprising the amino acid sequence of SEQ ID NO: 981.

[0344] 212. An AAV capsid variant (e.g., an AAV9 capsid variant) comprising an amino acid sequence encoded by the nucleotide sequence of SEQ ID NO: 983, or a nucleotide sequence at least 95% identical thereto.

[0345] 213. An AAV capsid variant (e.g., an AAV9 capsid variant) comprising the amino acid sequence of positions 203-736 of SEQ ID NO: 981, or an amino acid sequence at least 80% (e.g., at least 85, 90, 95, 96, 97, 98, or 99%) thereto, wherein the AAV capsid variant comprises the amino acid T at position 584, D at position 586, W at position 587, H at position 588, R at position 589, and I at position 590, numbered according to SEQ ID NO: 981.

[0346] 214. The AAV capsid variant of embodiment 213, which comprises the amino acid sequence of positions 203-736 of SEQ ID NO: 981.

[0347] 215. An AAV capsid variant (e.g., an AAV9 capsid variant) comprising the amino acid sequence of positions 203-736 of SEQ ID NO: 981.

[0348] 216. An AAV capsid variant (e.g., an AAV9 capsid variant) comprising the amino acid sequence of positions 138-736 of SEQ ID NO: 981, or an amino acid sequence at least 80% (e.g., at least 85, 90, 95, 96, 97, 98, or 99%) thereto, wherein the AAV capsid variant comprises the amino acid T at position 584, D at position 586, W at position 587, H at position 588, R at position 589, and I at position 590, numbered according to SEQ ID NO: 981.

[0349] 217. The AAV capsid any one of embodiments 213-216, wherein the AAV capsid variant comprises the amino acid sequence of positions 138-736 of SEQ ID NO: 981.

[0350] 218. An AAV capsid variant (e.g., an AAV9 capsid variant) comprising the amino acid sequence of positions 138-736 of SEQ ID NO: 981.

[0351] 219. An AAV capsid variant (e.g., an AAV9 capsid variant) comprising the amino acid sequence of SEQ ID NO: 981, or an amino acid sequence at least 80% (e.g., at least 85, 90, 95, 96, 97, 98, or 99%) thereto, wherein the AAV capsid variant comprises the amino acid T at position 584, D at position 586, W at position 587, H at position 588, R at position 589, and I at position 590, numbered according to SEQ ID NO: 981.

[0352] 220. The AAV capsid any one of embodiments 213-219, wherein the AAV capsid variant comprises the amino acid sequence of SEQ ID NO: 981.

[0353] 221. The AAV capsid variant of any one of embodiments 1-220, which has increased tropism for a CNS cell or tissue, e.g., a brain cell, brain tissue, spinal cord cell, or spinal cord tissue, relative to the tropism of a reference sequence comprising the amino acid sequence of SEQ ID NO: 138.

[0354] 222. The AAV capsid variant of any one of embodiments 1-221, which transduces a brain region, e.g., sensory cortex, motor cortex, putamen, thalamus, caudate, hippocampus, cerebellum optionally wherein the level of transduction is at least 39, 50, 100, 120, 132, 146, 150, 161, 174, 175, 200, 225, 250, 275, 283, 300, 350, 400, 450, 500, 525, 528, or 550-fold greater as compared to a reference sequence of SEQ ID NO: 138, e.g., when measured by an assay, e.g., an immunohistochemistry assay or a qPCR or ddPCR assay, e.g., as described in Example 2.

[0355] 223. The AAV capsid variant of any one of embodiments 1-222, which is enriched at least about 10, 14, 20, 24, 50, 100, 150, 200, 250, 300, 350, 400, 425, 450, or 460-fold, in the brain compared to a reference sequence of SEQ ID NO: 138, e.g., when measured by an assay as described in Example 1 or 3.

[0356] 224. The AAV capsid variant of any one of embodiments 1-223, which is enriched at least about 200, 300, 400, 425, 450, or 460-fold, in the brain compared to a reference sequence of SEQ ID NO: 138, e.g., when measured by an assay as described in Example 1.

[0357] 225. The AAV capsid variant of any one of embodiments 1-224, which is enriched in the brain of at least two to three species, e.g., a non-human primate and rodent (e.g., mouse), e.g., as compared to a reference sequence of SEQ ID NO: 138.

[0358] 226. The AAV capsid variant of any one of embodiments 1-225, which is enriched at least about 2, 3, 5, 10, 15, 20, 25, 30, 35, 40, 45, 50, 55, 60, 65, 70, 75, 80, 85, 90, 95, 100, 105, 115, 120, 125, 130, 135, 140, 145, 150, 155, 160, 165, 170, 175, 180, 190, 200, 205, or 210-fold, in the brain of at least two to three species, e.g., a non-human primate and rodent (e.g., mouse), compared to a reference sequence of SEQ ID NO: 138, e.g., when measured by an assay as described in Example 1 or 4.

[0359] 227. The AAV capsid variant of embodiment 225 or 226, wherein the at least two to three species are Macaca fascicularis, Chlorocebus sabaeus, Callithrix jacchus, and/or mouse (e.g., outbred mice).

[0360] 228. The AAV capsid variant of any one of embodiments 1-227, which is enriched at least about 2, 3, 4, 5, 10, 15, 17, 20, 50, 75, 100, 103, 107, 125, 150, 200, 250, 300, 350, 400, 450, 500, 750, 1000, 1200-fold, in the brain compared to a reference sequence of SEQ ID NO: 981, e.g., when measured by an assay as described in Example 3.

[0361] 229. The AAV capsid variant of any one of embodiments 1-228, which delivers an increased level of a payload to a brain region, optionally wherein the level of the payload is increased by at least 39, 50, 100, 120, 132, 146, 150, 161, 174, 175, 200, 225, 250, 275, 283, 300, 350, 400, 450, 500, 525, 528, or 550-fold, as compared to a reference sequence of SEQ ID NO: 138, e.g., when measured by an assay, e.g., a qRT-PCR, a ddPCR, or a qPCR assay (e.g., as described in Example 2).

[0362] 230. The AAV capsid variant of any one of embodiments 1-229, which delivers an increased level of viral genomes to a brain region, optionally wherein the level of viral genomes is increased by at least 2, 5, 7, 10, 15, 19, 20, 22, or 25-fold, as compared to a reference sequence of SEQ ID NO: 138, e.g., when measured by an assay, e.g., a qRT-PCR or a qPCR assay (e.g., as described in Example 2).

[0363] 231. The AAV capsid variant of embodiment 229 or 230, wherein the brain region is a sensory cortex, motor cortex, putamen, thalamus, caudate, hippocampus, and/or cerebellum.

[0364] 232. The AAV capsid variant of any one of embodiments 1-231, which is enriched at least about 5, 10, 50, 100, 115, 120, 150, 175, 200, 207, 225, 250, or 275-fold, in the spinal cord compared to a reference sequence of SEQ ID NO: 138, e.g., when measured by an assay as described in Example 1 or 2.

[0365] 233. The AAV capsid variant of any one of the preceding embodiments, which is isolated, e.g., recombinant.

[0366] 234. A polynucleotide encoding the AAV capsid variant of any one of embodiments 1-233.

[0367] 235. The polynucleotide of embodiment 234, which comprises:
[0368] (i) a nucleotide sequence comprising at least one, two, three, four, five, six, or seven modifications, e.g., substitutions, but no more than ten modifications, e.g., substitutions, relative to the nucleotide sequences of SEQ ID NO: 942;
[0369] (ii) a nucleotide sequence comprising at least one, two, three, four, five, six, or seven, but no more than ten different nucleotides, relative to the nucleotide sequences of SEQ ID NO: 942; or
[0370] (iii) the nucleotide sequence of SEQ ID NO: 942, or nucleotide sequence substantially identical (e.g., having at least 70%, 75%, 80%, 85%, 90%, 92%, 95%, 97%, 98%, or 99% sequence identity) thereto.

[0371] 236. The polynucleotide of embodiment 234 or 235, which comprises the nucleotide sequence of SEQ ID NO: 983, or a nucleotide sequence with at least 80% (e.g., at least 85, 90, 95, 96, 97, 98, or 99%) sequence identity thereto.

[0372] 237. The polynucleotide of any one of embodiments 234-236, which comprises a nucleotide sequence that is codon optimized.

[0373] 238. A peptide comprising:
[0374] (a) the amino acid sequence of any of the sequences provided in Tables 1, 2A, 2B, 14, 15, or 16;
[0375] (b) an amino acid sequence comprising at least 3, 4, 5, 6, 7, 8, 9, 10, 11, 12, 13, or 14 consecutive amino acids from any one of the sequences provided in Tables 1, 2A, 2B, 14, 15, or 16;
[0376] (c) an amino acid sequence comprising at least one, two, or three but no more than four different amino acids relative to the amino acid sequence of any one of the sequences provided in Tables 1, 2A, 2B, 14, 15, or 16; or
[0377] (d) an amino acid sequence comprising at least one, two, or three but no more than four modifications, e.g., substitutions (e.g., conservative substitutions), relative to the amino acid sequence of any one of the sequences provided in Tables 1, 2A, 2B, 14, 15, or 16.

[0378] 239. A peptide comprising:
[0379] (a) the amino acid sequence of any of SEQ ID NOs: 201, 205-209, 211-214, 216, 219, 220, 230, 232, 237, 238, 255, 262-265, 274, 283, 286, 290, 291, 293, 301, 306, 307, 308, 309, 314, or 336;
[0380] (b) an amino acid sequence comprising at least 3, 4, 5, 6, 7, 8, 9, 10, 11, 12, 13, or 14 consecutive amino acids from any one of SEQ ID NOs: 201, 205-209, 211-214, 216, 219, 220, 230, 232, 237, 238, 255, 262-265, 274, 283, 286, 290, 291, 293, 301, 306, 307, 308, 309, 314, or 336;
[0381] (c) an amino acid sequence comprising at least one, two, or three but no more than four different amino acids relative to the amino acid sequence of any one of SEQ ID NOs: 201, 205-209, 211-214, 216, 219, 220, 230, 232, 237, 238, 255, 262-265, 274, 283, 286, 290, 291, 293, 301, 306, 307, 308, 309, 314, or 336; or
[0382] (d) an amino acid sequence comprising at least one, two, or three but no more than four modifications, e.g., substitutions (e.g., conservative substitutions), relative to the amino acid sequence of any one of SEQ ID NOs: 201, 205-209, 211-214, 216, 219, 220, 230, 232, 237, 238, 255, 262-265, 274, 283, 286, 290, 291, 293, 301, 306, 307, 308, 309, 314, or 336.

[0383] 240. A peptide comprising:
[0384] (i) the amino acid sequence of TQDWHRI (SEQ ID NO: 941);
[0385] (ii) an amino acid sequence comprising at least one, two, or three, but no more than four different amino acids relative to the amino acid sequence of TQDWHRI (SEQ ID NO: 941);
[0386] (iii) an amino acid sequence comprising at least one, two, or three modifications, e.g., substitutions (e.g., conservative substitutions), but no more than four modifications, e.g., substitutions (e.g., conservative substitutions), relative to the amino acid sequence of TQDWHRI (SEQ ID NO: 941); or
[0387] (iv) at least 3, 4, 5, or 6 consecutive amino acids from the amino acid sequence of TQDWHRI (SEQ ID NO: 941).

[0388] 241. A peptide encoded by:
[0389] (i) the nucleotide sequence of SEQ ID NO: 942, or a nucleotide sequence substantially identical (e.g., having at least 70%, 75%, 80%, 85%, 90%, 92%, 95%, 97%, 98%, or 99% sequence identity) thereto;
[0390] (ii) a nucleotide sequence comprising at least one, two, three, four, five, six, or seven, but no more than ten different nucleotides relative to the nucleotide sequence of SEQ ID NO: 942; or
[0391] (iii) a nucleotide sequence comprising at least one, two, three, four, five, six, or seven modifications, e.g., substitutions, but no more than ten modifications, e.g., substitutions, relative to the nucleotide sequence of SEQ ID NO: 942.

[0392] 242. A peptide wherein the nucleotide sequence encoding the peptide comprises:
[0393] (i) the nucleotide sequence of SEQ ID NO: 942, or a nucleotide sequence substantially identical (e.g., having at least 70%, 75%, 80%, 85%, 90%, 92%, 95%, 97%, 98%, or 99% sequence identity) thereto;
[0394] (ii) a nucleotide sequence comprising at least one, two, three, four, five, six, or seven, but not more than 10 different nucleotides, relative to the nucleotide sequence of SEQ ID NO: 942; or
[0395] (iii) a nucleotide sequence comprising at least one, two, three, four, five, six, or seven modifications, e.g., substitutions, but no more than ten modifications, e.g., substitutions, relative to the nucleotide sequence of SEQ ID NO: 942.

[0396] 243. A peptide comprising an amino acid sequence having the following formula: [N1]-[N2]-[N3] according to any one of embodiments 1-4, 7-22, 28-40, 43-51, 54, 55, 58-66, 72-82, 87-94, or 125-129.

[0397] 244. The peptide of any one of embodiments 238-243, which is fused or coupled, e.g., conjugated, to an active agent, e.g., a therapeutic agent or a diagnostic agent.

[0398] 245. The peptide of any one of embodiments 238-244, wherein at least 1-5, e.g., at least 1, 2, 3, 4, or 5, peptides are fused or coupled, e.g., conjugated, to an active agent, e.g., a therapeutic agent or a diagnostic agent.

[0399] 246. The peptide of embodiment 245, wherein the at least 1-5, e.g., at least 1, 2, 3, 4, or 5, peptides comprise the same amino acid sequence.

[0400] 247. The peptide of embodiment 245, wherein the at least 1-5, e.g., at least 1, 2, 3, 4, or 5, peptides comprise different amino acid sequences.

[0401] 248. The peptide of any one of embodiments 245-247, wherein the at least 1-5, e.g., at least 1, 2, 3, 4, or 5, peptides are present in tandem (e.g., connected directly or indirectly via a linker) or in a multimeric configuration.

[0402] 249. The peptide of any one of embodiments 238-248, wherein the peptide comprises an amino acid sequence of at least 3, 4, 5, 6, 7, 8, 9, 10, 11, 12, 15, 20, 25, 30, or 35 amino acids in length.

[0403] 250. The peptide of any one of embodiments 244-249, wherein the active agent is or comprises a therapeutic agent chosen from a protein (e.g., an enzyme), an antibody molecule, a nucleic acid molecule (e.g., an RNAi agent), or a small molecule.

[0404] 251. The peptide of any one of embodiments 244-249, wherein the active agent is or comprises a ribonucleic acid complex (e.g., a Cas9/gRNA complex), a plasmid, a closed-end DNA, a circ-RNA, or an mRNA.

[0405] 252. The peptide of any one of embodiments 244-249, wherein the active agent is an RNAi agent.

[0406] 253. The peptide of embodiment 252, wherein the RNAi agent is a dsRNA, a siRNA, a shRNA, a pre-miRNA, a pri-miRNA, a miRNA, a stRNA, a lncRNA, a piRNA, an antisense oligonucleotide agent (ASO), or a snoRNA, optionally wherein the RNAi agent is an siRNA or an ASO, which further optionally comprises at least one modified nucleotide.

[0407] 254. The peptide of any one of embodiments 244-253, wherein the active agent modulates, e.g., inhibits, decreases or increases, expression of, a CNS related gene, mRNA, and/or protein.

[0408] 255. The peptide of any one of embodiments 244-249, wherein the active agent is a diagnostic agent is or comprises an imaging agent (e.g., a protein or small molecule compound coupled to a detectable moiety).

[0409] 256. The peptide of any one of embodiments 244-255, wherein the peptide covalently linked, e.g., directly or indirectly via a linker, to the active agent.

[0410] 257. The peptide of any one of embodiments 244-256, wherein the peptide is conjugated to the active agent via a linker.

[0411] 258. The peptide of embodiment 257, wherein the linker is a cleavable linker or a non-cleavable linker.

[0412] 259. The peptide of embodiment 258, wherein the cleavable linker is a pH sensitive linker or an enzyme sensitive linker.

[0413] 260. The peptide of embodiment 258 or 259, wherein:
[0414] (i) the pH sensitive linker comprises a hydrazine/hydrazone linker or a disulfide linker;
[0415] (ii) the enzyme sensitive linker comprises a peptide based linker, e.g., a peptide linker sensitive to a protease (e.g., a lysosomal protease); or a beta-glucuronide linker; or
[0416] (iii) the non-cleavable linker is a linker comprising a thioether group or a maleimidocaproyl group.

[0417] 261. The peptide of any one of embodiments 244-260, wherein:
[0418] (i) the peptide and the active agent are fused or coupled post-translationally, e.g., using click chemistry; or
[0419] (ii) the peptide and the active agent are fused or couple via chemically induced dimerization.

[0420] 262. The peptide of any one of embodiments 244-261, wherein the peptide is present N-terminal relative to the active agent.

[0421] 263. The peptide of any one of embodiments 244-261, wherein the peptide is present C-terminal relative to the active agent.

[0422] 264. The peptide of any one of embodiment 244-249, 254, or 256-263, wherein the peptide is present or coupled to a carrier, e.g., an exosome, a microvesicle, or a lipid nanoparticle (LNP), optionally, wherein the carrier comprises a therapeutic agent (e.g., an RNAi agent (e.g., an dsRNA, a siRNA, a shRNA, a pre-miRNA, a pri-miRNA, a miRNA, a stRNA, a lncRNA, a piRNA, an antisense oligonucleotide agent (ASO), or a snoRNA), an mRNA, a ribonucleoprotein complex (e.g., a Cas9/gRNA complex), or a circRNA).

[0423] 265. The peptide of embodiment 264, wherein the peptide is present on the surface of the carrier, optionally wherein at least 10%, 20%, 30%, 40%, 50%, 60%, 70%, or 80% of the surface of the carrier comprises at least 1-5, e.g., at least 1, 2, 3, 4, or 5 peptides according to any one of embodiments 422-436.

[0424] 266. An AAV capsid variant comprising the peptide of any one of embodiments 238-243.

[0425] 267. A polynucleotide encoding an AAV capsid variant (e.g., an AAV9 capsid variant) comprising:
[0426] (a) the amino acid sequence of any of the sequences provided in Tables 1, 2A, 2B, 9, 14, 15, or 16;
[0427] (b) an amino acid sequence comprising at least 3, 4, 5, 6, 7, 8, 9, 10, 11, 12, 13, or 14 consecutive amino acids from any one of the sequences provided in Tables 1, 2A, 2B, 9, 14, 15, or 16;
[0428] (c) an amino a sequence comprising at least one, two, or three but no more than four different amino acids, relative to the amino acid sequence of any one of the sequences provided in Tables 1, 2A, 2B, 9, 14, 15, or 16; or
[0429] (d) an amino acid sequence comprising at least one, two, or three but no more than four modifications, e.g., substitutions (e.g., conservative substitutions), relative to the amino acid sequence of any one of the sequences provided in Tables 1, 2A, 2B, 9, 14, 15, or 16;
[0430] optionally wherein:
   [0431] (i) the amino acid sequence of (a), (b), (c), and/or (d) replaces positions T582, N583, H584, Q585, S586, A587, Q588, A589, Q590, A591, Q592, T593, G594, W595, and/or V596, numbered according to the amino acid sequence of SEQ ID NO: 138; or
   [0432] (ii) the amino acid sequence of (a), (b), (c), and/or (d) corresponds to positions T582, N583, T584, Q585, D586, W587, H588, R589, 1590, A591, Q592, T593, G594, W595, and/or V596 of SEQ ID NO: 981.

[0433] 268. A polynucleotide encoding an AAV capsid variant (e.g., an AAV9 capsid variant), wherein the AAV capsid variant comprises:
[0434] (i) the amino acid sequence of TQDWHRI (SEQ ID NO: 941);
[0435] (ii) an amino acid sequence comprising at least one, two, or three, but no more than four different amino acids, relative to the amino acid sequence of TQDWHRI (SEQ ID NO: 941);
[0436] (iii) an amino acid sequence comprising at least one, two, or three modifications, e.g., substitutions (e.g., conservative substitutions), but no more than four modifications, e.g., substitutions (e.g., conservative substitutions), relative to the amino acid sequence of TQDWHRI (SEQ ID NO: 941); or
[0437] (iv) at least 3, 4, 5, or 6 consecutive amino acids from the amino acid sequence of TQDWHRI (SEQ ID NO: 941);
[0438] optionally wherein:
   [0439] (a) the amino acid sequence of (i), (ii), (iii), and/or (iv) replaces positions H584, Q585, S586, A587, Q588, A589, and/or Q590, numbered according to the amino acid sequence of SEQ ID NO: 138;
   [0440] (b) the amino acid sequence of (i), (ii), (iii), and/or (iv) corresponds to positions T584, Q585, D586, W587, H588, R589, and/or 1590 of SEQ ID NO: 981.

[0441] 269. The polynucleotide of embodiment 267 or 268, which comprises:
[0442] (i) the nucleotide sequence of SEQ ID NO: 942, or a nucleotide sequence substantially identical (e.g., having at least 70%, 75%, 80%, 85%, 90%, 92%, 95%, 97%, 98%, or 99% sequence identity) thereto;
[0443] (ii) a nucleotide sequence comprising at least one, two, three, four, five, six, or seven modifications, e.g., substitutions, but no more than ten modifications, e.g., substitutions, relative to the nucleotide sequence of SEQ ID NO: 942;
[0444] (iii) a nucleotide sequence comprising at least one, two, three, four, five, six, or seven modifications, e.g., substitutions, but no more than ten modifications, e.g., substitutions, relative to the nucleotide sequence of SEQ ID NO: 942.

[0445] 270. The polynucleotide of any one of embodiments 267-269, wherein the AAV capsid variant comprises:
[0446] (i) the amino acid sequence of SEQ ID NO: 981, or an amino acid sequence with at least 80% (e.g., at least 85, 90, 95, 96, 97, 98, or 99%) sequence identity thereto;
[0447] (ii) an amino acid sequence having at least one, two or three, but no more than four different amino acids, relative to the amino acid sequence of SEQ ID NO: 981; or
[0448] (iii) an amino acid sequence having at least one, two or three modifications, e.g., substitutions (e.g., conservative substitutions), but not more than 30, 20 or 10 modifications, e.g., substitutions (e.g., conservative substitutions), relative to the amino acid sequence of SEQ ID NO: 981.

[0449] 271. The polynucleotide of any one of embodiments 267-270, comprising the nucleotide sequence of SEQ ID NO: 983, or a nucleotide sequence with at least 80% (e.g., at least 85, 90, 95, 96, 97, 98, or 99%) sequence identity thereto.

[0450] 272. The polynucleotide, peptide, or AAV capsid variant, of any one of embodiments 1-272, which is isolated, e.g., recombinant.

[0451] 273. An AAV particle comprising the AAV capsid variant of any one of embodiments 1-233, 266, or 272, an AAV capsid variant comprising the peptide of any one of embodiments 238-243 or 272, or an AAV capsid variant encoded by the polynucleotide of any one of embodiments 234-237 or 267-272.

[0452] 274. The AAV particle of embodiment 273, which comprises a nucleotide sequence encoding a payload.

[0453] 275. The AAV particle of embodiment 274, wherein the encoded payload comprises a therapeutic protein or functional variant thereof; an antibody or antibody fragment; an enzyme; a component of a gene editing system; an RNAi agent (e.g., a dsRNA, siRNA, shRNA, pre-miRNA, pri-miRNA, miRNA, stRNA, lncRNA, piRNA, or snoRNA); or a combination thereof.

[0454] 276. The AAV particle of embodiment 275, wherein the therapeutic protein or functional variant thereof, e.g., a recombinant protein, is associated with (e.g., aberrantly expressed in) a neurological or neurodegenerative disorder, a muscular or neuromuscular disorder, or a neuro-oncological disorder.

[0455] 277. The AAV particle of embodiment 275 or 276, the therapeutic protein or functional variant thereof is chosen from apolipoprotein E (APOE) (e.g., ApoE2, ApoE3 and/or ApoE4); human survival of motor neuron (SMN) 1 or SMN2; glucocerebrosidase (GBA1); aromatic L-amino acid decarboxylase (AADC); aspartoacylase (ASPA); tripeptidyl peptidase I (CLN2); beta-galactosidase (GLB1); N-sulphoglucosamine sulphohydrolase (SGSH); N-acetyl-alpha-glucosaminidase (NAGLU); iduronate 2-sulfatase (IDS); intracellular cholesterol transporter (NPC1); gigaxonin (GAN); or a combination thereof.

[0456] 278. The AAV particle of embodiment 275, wherein the antibody or antibody binding fragment binds to:
[0457] (i) a CNS related target, e.g., an antigen associated with a neurological or neurodegenerative disorder, e.g., β-amyloid, APOE, tau, SOD1, TDP-43, huntingtin (HTT), and/or synuclein;
[0458] (ii) a muscular or neuromuscular related target, e.g., an antigen associated with a muscular or neuromuscular disorder; or
[0459] (iii) a neuro-oncology related target, e.g., an antigen associated with a neuro-oncological disorder, e.g., HER2, or EGFR (e.g., EGFRvIII).

[0460] 279. The AAV particle of embodiment 275, wherein the enzyme comprises a meganuclease, a zinc finger nuclease, a TALEN, a recombinase, integrase, a base editor, a Cas9, or a fragment thereof.

[0461] 280. The AAV particle of embodiment 275, wherein the component of a gene editing system comprises one or more components of a CRISPR-Cas system.

[0462] 281. The AAV particle of embodiment 275 or 280, wherein the one or more components of the CRISPR-Cas system comprises a Cas9, e.g., a Cas9 ortholog or a Cpf1, and a single guide RNA (sgRNA), optionally wherein:
[0463] (i) the sgRNA is located upstream (5′) of the cas9 enzyme; or
[0464] (ii) the sgRNA is located downstream (3′) of the cas9 enzyme.

[0465] 282. The AAV particle of embodiment 275, wherein the RNAi agent (e.g., a dsRNA, siRNA, shRNA, pre-miRNA, pri-miRNA, miRNA, stRNA, lncRNA, piRNA, or snoRNA), modulates, e.g., inhibits, expression of, a CNS related gene, mRNA, and/or protein.

[0466] 283. The AAV particle of embodiment 282, wherein the CNS related gene is chosen from SOD1, MAPT, APOE, HTT, C9ORF72, TDP-43, APP, BACE, SNCA, ATXN1, ATXN3, ATXN7, SCNIA-SCN5A, SCN8A-SCN11A, or a combination thereof.

[0467] 284. The AAV particle of any one of embodiments 273-283, which comprises a viral genome comprising a promoter operably linked to the nucleic acid sequence encoding the payload, 285. The AAV particle of embodiment 284, wherein the promoter is chosen from human elongation factor 1α-subunit (EF1α), cytomegalovirus (CMV) immediate-early enhancer and/or promoter, chicken β-actin (CBA) and its derivative CAG, β glucuronidase (GUSB), or ubiquitin C (UBC), neuron-specific enolase (NSE), platelet-derived growth factor (PDGF), platelet-derived growth factor B-chain (PDGF-β), intercellular adhesion molecule 2 (ICAM-2), synapsin (Syn), methyl-CpG binding protein 2 (MeCP2), Ca2+/calmodulin-dependent protein kinase II (CaMKII), metabotropic glutamate receptor 2 (mGluR2), neurofilament light (NFL) or heavy (NFH), β-globin minigene nβ2, preproenkephalin (PPE), enkephalin (Enk) and excitatory amino acid transporter 2 (EAAT2), glial fibrillary acidic protein (GFAP), myelin basic protein (MBP), a cardiovascular promoter (e.g., αMHC, cTnT, and CMV-MLC2k), a liver promoter (e.g., hAAT, TBG), a skeletal muscle promoter (e.g., desmin, MCK, C512) or a fragment, e.g., a truncation, or a functional variant thereof.

[0468] 286. The AAV particle of embodiment 284 or 285, wherein the promoter is an EF-la promoter variant, e.g., a truncated EF-la promoter.

[0469] 287. The AAV particle of any one of embodiments 284-286, wherein the promoter comprises the nucleotide sequence of any one of SEQ ID NOs: 987, 988, 990, 991, 995, 996, 998, 999-1007, or any one of the nucleotide sequence provided in Table 8; a nucleotide sequence comprising at least one, two, or three but no more than four modifications, e.g., substitutions (e.g., conservative substitutions), relative to the nucleotide sequence of SEQ ID NOs: 987, 988, 990, 991, 995, 996, 998, 999-1007, or any one of the nucleotide sequence provided in Table 8; or a nucleotide sequence with at least 80% (e.g., 85%, 90%, 95%, 96%, 97%, 98%, or 99%) sequence identity to any one of SEQ ID NOs: 987, 988, 990, 991, 995, 996, 998, 999-1007, or any one of the nucleotide sequence provided in Table 8.

[0470] 288. The AAV particle of any one of embodiments 284-287 wherein the viral genome further comprises a polyA signal sequence.

[0471] 289. The AAV particle of any one of embodiments 284-288, wherein the viral genome further comprises an inverted terminal repeat (ITR) sequence.

[0472] 290. The AAV particle of any one of embodiments 284-289, wherein the viral genome comprises an ITR sequence positioned 5′ relative to the encoded payload.

[0473] 291. The AAV particle of any one of embodiments 284-290, wherein the viral genome comprises an ITR sequence positioned 3′ relative to the encoded payload.

[0474] 292. The AAV particle of any one of embodiments 284-291, wherein the viral genome comprises an ITR sequence positioned 5′ relative to the encoded payload and an ITR sequence positioned 3′ relative to the encoded payload.

[0475] 293. The AAV particle of any one of embodiments 284-292, wherein the viral genome further comprises an enhancer, a Kozak sequence, an intron region, and/or an exon region.

[0476] 294. The AAV particle of any one of embodiments 284-293, wherein the viral genome further comprises a nucleotide sequence encoding a miR binding site, e.g., a miR binding site that modulates, e.g., reduces, expression of the antibody molecule encoded by the viral genome in a cell or tissue where the corresponding miRNA is expressed.

[0477] 295. The AAV particle of embodiment 294, wherein the encoded miRNA binding site is complementary, e.g., fully complementary or partially complementary, to a miRNA expressed in a cell or tissue of the DRG, liver, heart, hematopoietic, or a combination thereof.

[0478] 296. The AAV particle of embodiment 294 or 295, wherein the encoded miR binding site modulates, e.g., reduces, expression of the encoded antibody molecule in a cell or tissue of the DRG, liver, heart, hematopoietic lineage, or a combination thereof.

[0479] 297. The AAV particle of any one of embodiments 284-296, wherein the viral genome comprises at least 1-5 copies of the encoded miR binding site, e.g., at least 1, 2, 3, 4, or 5 copies.

[0480] 298. The AAV particle of any one of embodiments 284-297, wherein the viral genome comprises at least 3 copies of an encoded miR binding sites, optionally wherein all three copies comprise the same miR binding site, or at least one, two, three, or all of the copies comprise a different miR binding site.

[0481] 299. The AAV particle of embodiment 298, wherein the 3 copies of the encoded miR binding sites are continuous (e.g., not separated by a spacer), or are separated by a spacer, optionally wherein the spacer comprises the nucleotide sequence of GATAGTTA, or a nucleotide sequence having at least one, two, or three modifications, e.g., substitutions (e.g., conservative substitutions), but no more than four modifications, e.g., substitutions (e.g., conservative substitutions), relative to GATAGTTA.

[0482] 300. The AAV particle of any one of embodiments 284-299, wherein the viral genome comprises at least 4 copies of an encoded miR binding site, optionally wherein all four copies comprise the same miR binding site, or at least one, two, three, or all of the copies comprise a different miR binding site.

[0483] 301. The AAV particle of embodiment 300, wherein the 4 copies of the encoded miR binding sites are continuous (e.g., not separated by a spacer), or are separated by a spacer, optionally wherein the spacer comprises the nucleotide sequence of GATAGTTA, or a nucleotide sequence having at least one, two, or three modifications, e.g., substitutions, but no more than four modifications, e.g., substitutions, relative to GATAGTTA.

[0484] 302. The AAV particle of any one of embodiments 294-301, wherein the encoded miR binding site comprises a miR 122 binding site, a miR183 binding site, a miR1 binding site, a miR142-3p, or a combination thereof, optionally wherein:
[0485] (i) the encoded miR122 binding site comprises the nucleotide sequence of SEQ ID NO: 4673, or a nucleotide sequence substantially identical (e.g., having at least 70%, 75%, 80%, 85%, 90%, 92%, 95%, 97%, 98%, or 99% sequence identity) thereto; or a nucleotide sequence having at least one, two, three, four, five, six, or seven modifications, e.g., substitutions, but no more than ten modifications, e.g., substitutions, relative to SEQ ID NO: 4673;
[0486] (ii) the encoded miR 183 binding site comprises the nucleotide sequence of SEQ ID NO: 4676, or a nucleotide sequence substantially identical (e.g., having at least 70%, 75%, 80%, 85%, 90%, 92%, 95%, 97%, 98%, or 99% sequence identity) thereto; or a nucleotide sequence having at least one, two, three, four, five, six, or seven modifications, e.g., substitutions, but no more than ten modifications, e.g., substitutions, relative to SEQ ID NO: 4676;
[0487] (iii) the encoded miR1 binding site comprises the nucleotide sequence of SEQ ID NO: 4679, or a nucleotide sequence substantially identical (e.g., having at least 70%, 75%, 80%, 85%, 90%, 92%, 95%, 97%, 98%, or 99% sequence identity) thereto; or a nucleotide sequence having at least one, two, three, four, five, six, or seven modifications, e.g., substitutions, but no more than ten modifications, e.g., substitutions, relative to SEQ ID NO: 4679; and/or
[0488] (iv) the encoded miR142-3p binding site comprises the nucleotide sequence of SEQ ID NO: 4675, or a nucleotide sequence substantially identical (e.g., having at least 70%, 75%, 80%, 85%, 90%, 92%, 95%, 97%, 98%, or 99% sequence identity) thereto; or a nucleotide sequence having at least one, two, three, four, five, six, or seven modifications, e.g., substitutions, but no more than ten modifications, e.g., substitutions, relative to SEQ ID NO: 4675.

[0489] 303. The AAV particle of any one of embodiments 284-2302, wherein the viral genome comprises an encoded miR 122 binding site.

[0490] 304. The AAV particle of any one of embodiments 284-303, wherein the viral genome comprises at least 1-5 copies, e.g., 1, 2, or 3 copies of a miR122 binding site, optionally wherein each copy is continuous (e.g., not separated by a spacer), or each copy is separated by a spacer, optionally wherein the spacer comprises the nucleotide sequence of GATAGTTA, or a nucleotide sequence having at least one, two, or three modifications, e.g., substitutions, but no more than four modifications, e.g., substitutions, relative to GATAGTTA.

[0491] 305. The AAV particle of embodiment 303 or 304, wherein the encoded miR122 binding site comprises the nucleotide sequence of SEQ ID NO: 4673, or a nucleotide sequence substantially identical (e.g., having at least 70%, 75%, 80%, 85%, 90%, 92%, 95%, 97%, 98%, or 99% sequence identity) thereto; or a nucleotide sequence having at least one, two, three, four, five, six, or seven modifications, e.g., substitutions, but no more than ten modifications, e.g., substitutions, relative to SEQ ID NO: 4673.

[0492] 306. The AAV particle of any one of embodiments 284-305, wherein the viral genome comprises: (A) (i) a first encoded miR 122 binding site comprising the nucleotide sequence of SEQ ID NO: 4673, or a nucleotide sequence substantially identical (e.g., having at least 70%, 75%, 80%, 85%, 90%, 92%, 95%, 97%, 98%, or 99% sequence identity) thereto; or a nucleotide sequence having at least one, two, three, four, five, six, or seven modifications, e.g., substitutions, but no more than ten modifications, e.g., substitutions, relative to SEQ ID NO: 4673;
[0493] (ii) a first spacer comprising the nucleotide sequence of GATAGTTA, or a nucleotide sequence having at least one, two, or three modifications, e.g., substitutions, but no more than four modifications, e.g., substitutions, relative to GATAGTTA; and
[0494] (iii) a second encoded miR 122 binding site comprising the nucleotide sequence of SEQ ID NO: 4673, or a nucleotide sequence substantially identical (e.g., having at least 70%, 75%, 80%, 85%, 90%, 92%, 95%, 97%, 98%, or 99% sequence identity) thereto; or a nucleotide sequence having at least one, two, three, four, five, six, or seven modifications, e.g., substitutions, but no more than ten modifications, e.g., substitutions, relative to SEQ ID NO: 4673; or

[0495] (B) (i) a first encoded miR 122 binding site comprising the nucleotide sequence of SEQ ID NO: 4673, or a nucleotide sequence substantially identical (e.g., having at least 70%, 75%, 80%, 85%, 90%, 92%, 95%, 97%, 98%, or 99% sequence identity) thereto; or a nucleotide sequence having at least one, two, three, four, five, six, or seven modifications, e.g., substitutions, but no more than ten modifications, e.g., substitutions, relative to SEQ ID NO: 4673;
[0496] (ii) a first spacer comprising the nucleotide sequence of GATAGTTA, or a nucleotide sequence having at least one, two, or three modifications, e.g., substitutions, but no more than four modifications, e.g., substitutions, relative to GATAGTTA;
[0497] (iii) a second encoded miR 122 binding site comprising the nucleotide sequence of SEQ ID NO: 4673, or a nucleotide sequence substantially identical (e.g., having at least 70%, 75%, 80%, 85%, 90%, 92%, 95%, 97%, 98%, or 99% sequence identity) thereto; or a nucleotide sequence having at least one, two, three, four, five, six, or seven modifications, e.g., substitutions, but no more than ten modifications, e.g., substitutions, relative to SEQ ID NO: 4673;
[0498] (iv) a second spacer comprising the nucleotide sequence of GATAGTTA, or a nucleotide sequence having at least one, two, or three modifications, e.g., substitutions, but no more than four modifications, e.g., substitutions, relative to GATAGTTA; and
[0499] (v) a third encoded miR 122 binding site comprising the nucleotide sequence of SEQ ID NO: 4673, or a nucleotide sequence substantially identical (e.g., having at least 70%, 75%, 80%, 85%, 90%, 92%, 95%, 97%, 98%, or 99% sequence identity) thereto; or a nucleotide sequence having at least one, two, three, four, five, six, or seven modifications, e.g., substitutions, but no more than ten modifications, e.g., substitutions, relative to SEQ ID NO: 4673.

[0500] 307. The AAV particle of any one of embodiments 284-306, wherein the viral genome comprises an encoded miR 183 binding site.

[0501] 308. The AAV particle of any one of embodiments 284-307, wherein the viral genome comprises at least 1-5 copies, e.g., 1, 2, or 3 copies of a miR183 binding site, optionally wherein each copy is continuous (e.g., not separated by a spacer), or each copy is separated by a spacer, optionally wherein the spacer comprises the nucleotide sequence of GATAGTTA, or a nucleotide sequence having at least one, two, or three modifications, e.g., substitutions, but no more than four modifications, e.g., substitutions, relative to GATAGTTA.

[0502] 309. The AAV particle of embodiment 307 or 308, wherein the encoded miR183 binding site comprises the nucleotide sequence of SEQ ID NO: 4673, or a nucleotide sequence substantially identical (e.g., having at least 70%, 75%, 80%, 85%, 90%, 92%, 95%, 97%, 98%, or 99% sequence identity) thereto; or a nucleotide sequence having at least one, two, three, four, five, six, or seven modifications, e.g., substitutions, but no more than ten modifications, e.g., substitutions, relative to SEQ ID NO: 4673.

[0503] 310. The AAV particle of any one of embodiments 284-309, wherein the viral genome comprises: (A) (i) a first encoded miR 183 binding site comprising the nucleotide sequence of SEQ ID NO: 4676, or a nucleotide sequence substantially identical (e.g., having at least 70%, 75%, 80%, 85%, 90%, 92%, 95%, 97%, 98%, or 99% sequence identity) thereto; or a nucleotide sequence having at least one, two, three, four, five, six, or seven modifications, e.g., substitutions, but no more than ten modifications, e.g., substitutions, relative to SEQ ID NO: 4676;
[0504] (ii) a first spacer comprising the nucleotide sequence of GATAGTTA, or a nucleotide sequence having at least one, two, or three modifications, e.g., substitutions, but no more than four modifications, e.g., substitutions, relative to GATAGTTA; and
[0505] (iii) a second encoded miR 183 binding site comprising the nucleotide sequence of SEQ ID NO: 4676, or a nucleotide sequence substantially identical (e.g., having at least 70%, 75%, 80%, 85%, 90%, 92%, 95%, 97%, 98%, or 99% sequence identity) thereto; or a nucleotide sequence having at least one, two, three, four, five, six, or seven modifications, e.g., substitutions, but no more than ten modifications, e.g., substitutions, relative to SEQ ID NO: 4676; or

[0506] (B) (i) a first encoded miR 183 binding site comprising the nucleotide sequence of SEQ ID NO: 4676, or a nucleotide sequence substantially identical (e.g., having at least 70%, 75%, 80%, 85%, 90%, 92%, 95%, 97%, 98%, or 99% sequence identity) thereto; or a nucleotide sequence having at least one, two, three, four, five, six, or seven modifications, e.g., substitutions, but no more than ten modifications, e.g., substitutions, relative to SEQ ID NO: 4676;
[0507] (ii) a first spacer comprising the nucleotide sequence of GATAGTTA, or a nucleotide sequence having at least one, two, or three modifications, e.g., substitutions, but no more than four modifications, e.g., substitutions, relative to GATAGTTA;
[0508] (iii) a second encoded miR183 binding site comprising the nucleotide sequence of SEQ ID NO: 4676, or a nucleotide sequence substantially identical (e.g., having at least 70%, 75%, 80%, 85%, 90%, 92%, 95%, 97%, 98%, or 99% sequence identity) thereto; or a nucleotide sequence having at least one, two, three, four, five, six, or seven modifications, e.g., substitutions, but no more than ten modifications, e.g., substitutions, relative to SEQ ID NO: 4676;
[0509] (iv) a second spacer comprising the nucleotide sequence of GATAGTTA, or a nucleotide sequence having at least one, two, or three modifications, e.g., substitutions, but no more than four modifications, e.g., substitutions, relative to GATAGTTA; and
[0510] (v) a third encoded miR 183 binding site comprising the nucleotide sequence of SEQ ID NO: 4676, or a nucleotide sequence substantially identical (e.g., having at least 70%, 75%, 80%, 85%, 90%, 92%, 95%, 97%, 98%, or 99% sequence identity) thereto; or a nucleotide sequence having at least one, two, three, four, five, six, or seven modifications, e.g., substitutions, but no more than ten modifications, e.g., substitutions, relative to SEQ ID NO: 4676.

[0511] 311. The AAV particle of any one of embodiments 284-310, wherein the viral genome comprises an encoded miR 122 binding site and a miR1 binding site.

[0512] 312. The AAV particle of any one of embodiments 284-311, wherein the viral genome is single stranded or self-complementary.

[0513] 313. The AAV particle of any one of embodiments 284-312, wherein the viral genome further comprises a nucleotide sequence encoding a Rep protein, e.g., a non-structural protein, wherein the Rep protein comprises a Rep78 protein, a Rep68, Rep52 protein, and/or a Rep40 protein (e.g., a Rep78 and a Rep52 protein).

[0514] 314. The AAV particle of any one of embodiments 284-313, wherein the AAV particle further comprises a nucleotide sequence encoding a Rep protein, e.g., a non-structural protein, wherein the Rep protein comprises a Rep78 protein, a Rep68, Rep52 protein, and/or a Rep40 protein (e.g., a Rep78 and a Rep52 protein).

[0515] 315. The AAV particle of embodiment 313 or 314, wherein the Rep78 protein, the Rep68 protein, the Rep52 protein, and/or the Rep40 protein are encoded by at least one Rep gene.

[0516] 316. The AAV particle of any one of embodiments 284-315, wherein the viral genome further comprises a nucleic acid sequence encoding the AAV capsid variant of any one of embodiments 1-212, 222, or 228, an AAV capsid variant comprising the peptide of any one of embodiments 217-221 or 228, or an AAV capsid variant encoded by the polynucleotide of any one of embodiments 213-216 or 223-228.

[0517] 317. The AAV particle of any one of embodiments 273-316, which is isolated, e.g., recombinant.

[0518] 318. A vector comprising a polynucleotide encoding the AAV capsid variant of any one of embodiments 1-233, 266, or 272, the polynucleotide of any one of embodiments 234-237 or 267-272, or a polynucleotide encoding the peptide of any one of embodiments 238-243 or 272.

[0519] 319. A cell, e.g., a host cell, comprising the AAV capsid variant of any one of embodiments 1-233, 266, or 272, the polynucleotide of any one of embodiments 234-237 or 267-272, the peptide of any one of embodiments 238-243 or 272, the AAV particle of any one of embodiments 273-317, or the vector of embodiment 318.

[0520] 320. The cell of embodiment 319, wherein the cell is a mammalian cell or an insect cell.

[0521] 321. The cell of embodiment 319 or 320, wherein the cell is a cell of a brain region or a spinal cord region, optionally a cell of the sensory cortex, motor cortex, putamen, thalamus, caudate, hippocampus, cerebellum.

[0522] 322. A method of making an AAV particle, comprising
[0523] (i) providing a host cell comprising a viral genome; and
[0524] (ii) incubating the host cell under conditions suitable to enclose the viral genome in the AAV capsid variant of any one of embodiments 1-233, 266, or 272, an AAV capsid variant comprising the peptide of any one of embodiments 238-243 or 272, or an AAV capsid variant encoded by the polynucleotide of any one of embodiments 234-237 or 267-272;
[0525] thereby making the AAV particle.

[0526] 323. The method of embodiment 322, further comprising, prior to step (i), introducing a first nucleic acid molecule comprising the viral genome into the host cell.

[0527] 324. The method of embodiment 323, wherein the host cell comprises a second nucleic acid encoding the capsid variant.

[0528] 325. The method of embodiment 324, wherein the second nucleic acid molecule is introduced into the host cell prior to, concurrently with, or after the first nucleic acid molecule.

[0529] 326. A pharmaceutical composition comprising the AAV particle of any one of embodiments 273-317, an AAV particle comprising the capsid variant of any one of embodiments 1-233, 266, or 272, an AAV particle comprising the peptide of any one of embodiments 238-243 or 272, and a pharmaceutically acceptable excipient.

[0530] 327. A method of delivering a payload to a cell or tissue (e.g., a CNS cell or CNS tissue), comprising administering an effective amount of the pharmaceutical composition of embodiment 326, the AAV particle of any one of embodiments 273-317, an AAV particle comprising the capsid variant of any one of embodiments 1-233, 266, or 272, or an AAV particle comprising the peptide of any one of embodiments 238-243 or 272.

[0531] 328. The method of embodiment 327, wherein the cell is a cell of a brain region or a spinal cord region, optionally a cell of the frontal cortex, sensory cortex, motor cortex, caudate, cerebellar cortex, cerebral cortex, brain stem, hippocampus, or thalamus.

[0532] 329. The method of embodiment 327 or 328, wherein the cell is a neuron, a sensory neuron, and/or a motor neuron.

[0533] 330. The method of any one of embodiments 327-329, wherein the cell or tissue is within a subject.

[0534] 331. The method of embodiment 330, wherein the subject has, has been diagnosed with having, or is at risk of having a genetic disorder, e.g., a monogenic disorder or a polygenic disorder.

[0535] 332. The method of embodiment 330 or 331, wherein the subject has, has been diagnosed with having, or is at risk of having a neurological, e.g., a neurodegenerative disorder.

[0536] 333. The method of embodiment 330 or 331, wherein the subject has, has been diagnosed with having, or is at risk of having a neuro-oncological disorder.

[0537] 334. The method of embodiment 330 or 331, wherein the subject has, has been diagnosed with having, or is at risk of having a muscular disorder or a neuromuscular disorder.

[0538] 335. A method of treating a subject having or diagnosed with having a genetic disorder, e.g., a monogenic disorder or a polygenic disorder, comprising administering to the subject an effective amount of the pharmaceutical composition of embodiment 326, the AAV particle of any one of embodiments 273-317, an AAV particle comprising the capsid variant of any one of embodiments 1-233, 266, or 272, or an AAV particle comprising the peptide of any one of embodiments 238-243 or 272.

[0539] 336. A method of treating a subject having or diagnosed with having a neurological disorder, e.g., a neurodegenerative disorder, comprising administering to the subject an effective amount of the pharmaceutical composition of embodiment 326, the AAV particle of any one of embodiments 273-317, an AAV particle comprising the capsid variant of any one of embodiments 1-233, 266, or 272, or an AAV particle comprising the peptide of any one of embodiments 238-243 or 272.

[0540] 337. A method of treating a subject having or diagnosed with having a muscular disorder or a neuromuscular disorder, comprising administering to the subject an effective amount of the pharmaceutical composition of embodiment 326, the AAV particle of any one of embodiments 273-317, an AAV particle comprising the capsid variant of any one of embodiments 1-233, 266, or 272, or an AAV particle comprising the peptide of any one of embodiments 238-243 or 272.

[0541] 338. A method of treating a subject having or diagnosed with having a neuro-oncological disorder, comprising administering to the subject an effective amount of the pharmaceutical composition of embodiment 326, the AAV particle of any one of embodiments 273-317, an AAV particle comprising the capsid variant of any one of embodiments 1-233, 266, or 272, or an AAV particle comprising the peptide of any one of embodiments 238-243 or 272.

[0542] 339. The method of any one of embodiments 287-294, wherein the genetic disorder, neurological disorder, neurodegenerative disorder, muscular disorder, neuromuscular disorder, or neuro-oncological disorder is Huntington's Disease, Amyotrophic Lateral Sclerosis (ALS), Gaucher Disease, Dementia with Lewy Bodies, Parkinson's disease, Spinal Muscular Atrophy, Alzheimer's Disease, a leukodystrophy (e.g., Alexander disease, autosomal dominant leukodystrophy with autonomic diseases (ADLD), Canavan disease, cerebrotendinous xanthomatosis (CTX), metachromatic leukodystrophy (MLD), Pelizaeus-Merzbacher disease, or Refsum disease), or a cancer (e.g., a HER2/neu positive cancer or a glioblastoma).

[0543] 340. The method of any one of embodiments 335-339, where treating comprises prevention of progression of the disease or disorder in the subject.

[0544] 341. The method of embodiment 330-340, wherein the subject is a human.

[0545] 342. The method of any one of embodiments 330-341, wherein the AAV particle or the pharmaceutical composition is administered to the subject intravenously, via intra-cisterna magna injection (ICM), intracerebrally, intrathecally, intracerebroventricularly, via intraparenchymal administration, intraarterially, or intramuscularly.

[0546] 343. The method of any one of embodiments 330-342, wherein the AAV particle or pharmaceutical composition is administered to the subject via focused ultrasound (FUS), e.g., coupled with the intravenous administration of microbubbles (FUS-MB), or MRI-guided FUS coupled with intravenous administration.

[0547] 344. The method of any one of embodiments 330-343, wherein the AAV particle or pharmaceutical composition is administered to the subject intravenously.

[0548] 345. The method of any one of embodiments 330-344, wherein the AAV particle or pharmaceutical composition is administered to the subject via intra-cisterna magna injection (ICM).

[0549] 346. The method of any one of embodiments 330-345, wherein the AAV particle or pharmaceutical composition is administered to the subject intraarterially.

[0550] 347. The method of any one of embodiments 342-346, wherein administration of the AAV particle or pharmaceutical composition results in a decreased presence, level, and/or activity of a gene, mRNA, protein, or combination thereof.

[0551] 348. The method of any one of embodiments 342-346, wherein administration of the AAV particle or pharmaceutical composition results in an increased presence, level, and/or activity of a gene, mRNA, protein, or a combination thereof.

[0552] 349. The pharmaceutical composition of embodiment 326, the AAV particle of any one of embodiments 273-317, an AAV particle comprising the capsid variant of any one of embodiments 1-233, 266, or 272, or an AAV particle comprising the peptide of any one of embodiments 238-243 or 272, for use in a method of delivering a payload to a cell or tissue.

[0553] 350. The pharmaceutical composition of embodiment 326, the AAV particle of any one of embodiments 273-317, an AAV particle comprising the capsid variant of any one of embodiments 1-233, 266, or 272, or an AAV particle comprising the peptide of any one of embodiments 238-243 or 272, for use in a method of treating a genetic disorder, a neurological disorder, a neurodegenerative disorder, a muscular disorder, a neuromuscular disorder, or a neuro-oncological disorder.

[0554] 351. The pharmaceutical composition of embodiment 326, the AAV particle of any one of embodiments 273-317, an AAV particle comprising the capsid variant of any one of embodiments 1-233, 266, or 272, or an AAV particle comprising the peptide of any one of embodiments 238-243 or 272, for use in the manufacture of a medicament.

[0555] 352. Use of the pharmaceutical composition of embodiment 326, the AAV particle of any one of embodiments 273-317, an AAV particle comprising the capsid variant of any one of embodiments 1-233, 266, or 272, or an AAV particle comprising the peptide of any one of embodiments 238-243 or 272, in the manufacture of a medicament.

[0556] 353. Use of the pharmaceutical composition of embodiment 326, the AAV particle of any one of embodiments 273-317, an AAV particle comprising the capsid variant of any one of embodiments 1-233, 266, or 272, or an AAV particle comprising the peptide of any one of embodiments 238-243 or 272, in the manufacture of a medicament for treating a genetic disorder, a neurological disorder, a neurodegenerative disorder, a muscular disorder, a neuromuscular disorder, or a neuro-oncological disorder.

[0557] The details of one or more embodiments of the disclosure are set forth in the accompanying description below. Other features, objects and advantages of the disclosure will be apparent from the description. In the description, the singular forms also include the plural unless the context clearly dictates otherwise. Certain terms are defined in the Definition section and throughout.

### DETAILED DESCRIPTION OF THE DISCLOSURE

[0558] Described herein, inter alia, are compositions comprising an AAV capsid variant, e.g., an AAV capsid variant described herein, and methods of making and using the same. Generally, the AAV capsid variant has enhanced tropism for a cell or tissue, e.g., for the delivery of a payload to said cell or tissue, for example a CNS tissue or a CNS cell or a liver cell or liver tissue.

[0559] As demonstrated in the Examples herein below, certain AAV capsid variants described herein show multiple advantages over wild-type AAV9, including (i) increased penetrance through the blood brain barrier following intravenous administration, (ii) wider distribution throughout the multiple brain regions, e.g., frontal cortex, sensory cortex, motor cortex, putamen, thalamus, cerebellar cortex, dentate nucleus, caudate, and/or hippocampus, and/or (iii) elevated payload expression in multiple brain regions. Without wishing to be being bound by theory, it is believed that these advantages may be due, in part, to the dissemination of the AAV capsid variants through the brain vasculature. In some embodiments, the AAV capsids described herein enhance the delivery of a payload to multiple regions of the brain including for example, the frontal cortex, sensory cortex, motor cortex, putamen, thalamus, cerebellar cortex, dentate nucleus, caudate, and/or hippocampus.

[0560] Several approaches have been used previously to produce AAV capsids with enhanced tropism for a cell or tissue, e.g., a CNS cell or tissue. One approach used co-infection of cultured cells (Grimm et al. In vitro and in vivo gene therapy vector evolution via multispecies interbreeding and retargeting of adeno-associated viruses. J. Virol. 2008 June 82 (12): 5887-5911, the contents of which are herein incorporated by reference in its entirety) or in situ animal tissue (Lisowski et al. Selection and evaluation of clinically relevant AAV variants in a xenograft liver model. Nature 2014 506:382-386, the contents of which are herein incorporated by reference in its entirety) with adenovirus, in order to trigger exponential replication of infectious AAV DNA. Another approach involved the use of cell-specific CRE transgenic mice (Deverman et al. Cre-dependent selection yields AAV variants for widespread gene transfer to the adult brain. Nat Biotechnol. 2016 Feb. 34 (2) 204-209; the contents of which are herein incorporated by reference in its entirety) allowing viral DNA recombination specifically in astrocytes, followed by recovery of CRE-recombined capsid variants. Other approaches apply high throughput DNA synthesis, multiplexing, sequencing technologies, and machine learning to evaluate sequencing reads of viral DNA in different tissues to engineer variant capsids. These approaches are different from the approach disclosed herein.

[0561] There are some limitations to the art-known capsid generation methods. For example, the transgenic CRE system used by Deverman et al. (2016) has limited tractable in other animal species and AAV variants selected by directed evolution in mouse tissue do not show similar properties in large animals. Previously described transduction-specific approaches are not amenable to large animal studies because: 1) many tissues of interest (e.g., CNS) are not readily accessible to adenovirus co-infection, 2) the specific adenovirus tropism itself would bias the library distribution, and 3) large animals are typically not amenable to transgenesis or genetic engineering to express CRE recombinase in defined cell types.

[0562] To address these limitations, a broadly-applicable functional AAV capsid library screening platform for cell type-specific biopanning in non-transgenic animals has been developed and is described in the appended Examples. In the TRACER (Tropism Redirection of AAV by Cell type-specific Expression of RNA) platform system, the capsid gene is placed under the control of a cell type-specific promoter to drive capsid mRNA expression in the absence of helper virus co-infection. Without wishing to be bound by theory, it is believed that this RNA-driven screen increases the selective pressure in favor of capsid variants which transduce a specific cell type. The TRACER platform allows for generation of AAV capsid libraries whereby specific recovery and subcloning of capsid mRNA expressed in transduced cells is achieved with no need for transgenic animals or helper virus co-infection. Without wishing to be bound by theory, it is believed that since mRNA transcription is a hallmark of full transduction, the methods disclosed herein allow identification of fully infectious AAV capsid mutants, and in addition to its higher stringency, this method allows identification of capsids with high tropism for particular cell types using libraries designed to express CAP mRNA under the control of any cell-specific promoter such as, but not limited to, synapsin-1 promoter (neurons), GFAP promoter (astrocytes), TBG promoter (liver), CAMK promoter (skeletal muscle), MYH6 promoter (cardiomyocytes). Described herein are novel AAV capsid variants generated using the TRACER method which demonstrate enhance tropism in for example a CNS cell, a CNS tissue, a liver cell, a liver tissue, a muscle cell, or a muscle tissue.

[0563] In some embodiments, an AAV capsid variant disclosed herein comprises a modification in loop VIII of AAV9, e.g., at positions between 580-599, e.g., at one, two, three, four, five or all of positions 584, 586, 587, 588, 589, and/or 590, numbered relative to SEQ ID NO: 138 or 981. In some embodiments, loop (e.g., loop VIII) is used interchangeably herein with the term variable region (e.g., variable region VIII), or VR (e.g., VR-VIII). In some embodiments loop VIII comprises positions 580-599 (e.g., amino acids VATNHQSAQAQAQTGWVQNQ (SEQ ID NO: 5122)), numbered according to SEQ ID NO: 138. In some embodiments loop VIII comprises positions 582-593 (e.g., amino acids TNHQSAQAQAQT (SEQ ID NO: 5123)), numbered according to SEQ ID NO: 138. In some embodiments loop VIII comprises positions 587-593 (e.g., amino acids AQAQAQT (SEQ ID NO: 4687)), numbered according to SEQ ID NO: 138. In some embodiments loop VIII comprises positions 587-590 (e.g., amino acids AQAQ (SEQ ID NO: 5099)), numbered according to SEQ ID NO: 138. In some embodiments, loop VIII or variable region VIII (VR-VIII) is as described in DiMattia et al. “Structural Insights into the Unique Properties of the Adeno-Associated Virus Serotype 9.” Journal of Virology, 12 (86): 6947-6958 (the contents of which are hereby incorporated by reference in their entirety), e.g., comprising positions 581-593, numbered according to SEQ ID NO: 138.

[0564] The AAV particles and payloads of the disclosure may be delivered to one or more target cells, tissues, organs, or organisms. In some embodiments, the AAV particles of the disclosure demonstrate enhanced tropism for a target cell type, tissue or organ. As a non-limiting example, the AAV particle may have enhanced tropism for cells and tissues of the central or peripheral nervous systems (CNS and PNS, respectively). In some embodiments, an AAV particle of the disclosure may, in addition, or alternatively, have decreased tropism for a cell-type, tissue or organ.

[0565] In some embodiments, an AAV comprises a small non-enveloped icosahedral capsid virus of the Parvoviridae family and is characterized by a single stranded DNA viral genome. Parvoviridae family viruses consist of two subfamilies: Parvovirinae, which infect vertebrates, and Densovirinae, which infect invertebrates. The Parvoviridae family comprises the Dependovirus genus which includes AAV, capable of replication in vertebrate hosts including, but not limited to, human, primate, bovine, canine, equine, and ovine species.

[0566] The parvoviruses and other members of the Parvoviridae family are generally described in Kenneth I, Berns, “Parvoviridae: The Viruses and Their Replication,” Chapter 69 in FIELDS VIROLOGY (3d Ed. 1996), the contents of which are incorporated by reference in their entirety.

[0567] In some embodiments, AAV are used as a biological tool due to a relatively simple structure, their ability to infect a wide range of cells (including quiescent and dividing cells) without integration into the host genome and without replicating, and their relatively benign immunogenic profile. The genome of the virus may be manipulated to contain a minimum of components for the assembly of a functional recombinant virus, or viral particle, which is loaded with or engineered to target a particular tissue and express or deliver a desired payload.

[0568] In some embodiments, the AAV, is a naturally occurring (e.g., wild-type) AAV or a recombinant AAV. In some embodiments, the wild-type AAV vector genome is a linear, single-stranded DNA (ssDNA) molecule approximately 5,000 nucleotides (nt) in length. In some embodiments, inverted terminal repeats (ITRs) cap the viral genome at both the 5′ and the 3′ end, providing origins of replication for the viral genome. In some embodiments, an AAV viral genome typically comprises two ITR sequences. These ITRs have a characteristic T-shaped hairpin structure defined by a self-complementary region (145nt in wild-type AAV) at the 5′ and 3′ ends of the ssDNA which form an energetically stable double stranded region. The double stranded hairpin structures comprise multiple functions including, but not limited to, acting as an origin for DNA replication by functioning as primers for the endogenous DNA polymerase complex of the host viral replication cell.

[0569] In some embodiments, the wild-type AAV viral genome further comprises nucleotide sequences for two open reading frames, one for the four non-structural Rep proteins (Rep78, Rep68, Rep52, Rep40, encoded by Rep genes) and one for the three capsid, or structural, proteins (VP1, VP2, VP3, encoded by capsid genes or Cap genes). The Rep proteins are used for replication and packaging, while the capsid proteins are assembled to create the protein shell of the AAV, or AAV capsid polypeptide, e.g., an AAV capsid variant. Alternative splicing and alternate initiation codons and promoters result in the generation of four different Rep proteins from a single open reading frame and the generation of three capsid proteins from a single open reading frame. Though it varies by AAV serotype, as a non-limiting example, for AAV9/hu.14 (SEQ ID NO: 123 of U.S. Pat. No. 7,906,111, the contents of which are herein incorporated by reference in their entirety) VP1 refers to amino acids 1-736, VP2 refers to amino acids 138-736, and VP3 refers to amino acids 203-736. In some embodiments, for any one of the amino acid sequences of SEQ ID NO: 981, VP1 comprises amino acids 1-736, VP2 comprises amino acids 138-736, and VP3 comprises amino acids 203-736. In other words, VP1 is the full-length capsid sequence, while VP2 and VP3 are shorter components of the whole. As a result, changes in the sequence in the VP3 region, are also changes to VP1 and VP2, however, the percent difference as compared to the parent sequence will be greatest for VP3 since it is the shortest sequence of the three. Though described here in relation to the amino acid sequence, the nucleic acid sequence encoding these proteins can be similarly described. Together, the three capsid proteins assemble to create the AAV capsid protein. While not wishing to be bound by theory, the AAV capsid protein typically comprises a molar ratio of 1:1:10 of VP1: VP2: VP3.

[0570] AAV vectors of the present disclosure may be produced recombinantly and may be based on adeno-associated virus (AAV) reference sequences. In addition to single stranded AAV viral genomes (e.g., ssAAVs), the present disclosure also provides for self-complementary AAV (scAAVs) viral genomes. scAAV vector genomes contain DNA strands which anneal together to form double stranded DNA. By skipping second strand synthesis, scAAVs allow for rapid expression in the transduced cell. In some embodiments, the AAV particle of the present disclosure is an scAAV. In some embodiments, the AAV particle of the present disclosure is an ssAAV.

[0571] Methods for producing and/or modifying AAV particles are disclosed in the art such as pseudotyped AAV vectors (PCT Patent Publication Nos. WO200028004; WO200123001; WO2004112727; WO2005005610; and WO2005072364, the content of each of which is incorporated herein by reference in its entirety).

[0572] As described herein, the AAV particles of the disclosure comprising an AAV capsid variant, and a viral genome, have enhanced tropism for a cell-type or a tissue, e.g., a CNS cell-type, region, or tissue.

### Peptides

[0573] Disclosed herein are peptides, and associated AAV particles comprising an AAV capsid variant and a peptide for enhanced or improved transduction of a target tissue (e.g., cells of the CNS or PNS). In some, embodiments, the peptide is an isolated, e.g., recombinant, peptide. In some embodiments, the nucleic acid encoding the peptide, is an isolated, e.g., recombinant nucleic acid.

[0574] In some embodiments, the peptide may increase distribution of an AAV particle to a cell, region, or tissue of the CNS. The cell of the CNS may be, but is not limited to, neurons (e.g., excitatory, inhibitory, motor, sensory, autonomic, sympathetic, parasympathetic, Purkinje, Betz, etc.), glial cells (e.g., microglia, astrocytes, oligodendrocytes) and/or supporting cells of the brain such as immune cells (e.g., T cells). The tissue of the CNS may be, but is not limited to, the cortex (e.g., frontal, parietal, occipital, temporal), thalamus, hypothalamus, striatum, putamen, caudate nucleus, hippocampus, entorhinal cortex, basal ganglia, or deep cerebellar nuclei. In some embodiments, the tissue of the CNS is a sensory cortex, motor cortex, putamen, thalamus, caudate, hippocampus, cerebellum, or a combination thereof.

[0575] In some embodiments, the peptide may increase distribution of an AAV particle to a cell, region, or tissue of the PNS. The cell or tissue of the PNS may be, but is not limited to, a dorsal root ganglion (DRG).

[0576] In some embodiments, the peptide may increase distribution of an AAV particle to the CNS (e.g., sensory cortex, motor cortex, putamen, thalamus, caudate, hippocampus, and/or cerebellum) after intravenous administration. In some embodiments, the peptide may increase distribution of an AAV particle to the CNS (e.g., the sensory cortex, motor cortex, putamen, thalamus, caudate, hippocampus, and/or cerebellum) following focused ultrasound (FUS), e.g., coupled with the intravenous administration of microbubbles (FUS-MB), or MRI-guided FUS coupled with intravenous administration.

[0577] In some embodiments, the peptide may increase distribution of an AAV particle to the PNS (e.g., DRG) after intravenous administration. In some embodiments, the peptide may increase distribution of an AAV particle to the PNS (e.g., DRG) following focused ultrasound (FUS), e.g., coupled with the intravenous administration of microbubbles (FUS-MB), or MRI-guided FUS coupled with intravenous administration.

[0578] A peptide may vary in length. In some embodiments, the peptide is about 3 to about 20 amino acids in length. As non-limiting examples, the peptide may be 3, 4, 5, 6, 7, 8, 9, 10, 11, 12, 13, 14, 15, 16, 17, 18, 19, 20 or 3-5, 3-8, 3-10, 3-12, 3-15, 3-18, 3-20, 5-10, 5-15, 5-20, 10-12, 10-15, 10-20, 12-20, or 15-20 amino acids in length. In some embodiments, a peptide comprises about 10 to 16 amino acids in length, e.g., about 15 amino acids in length. In some embodiments, a peptide comprises about 5 to 10 amino acids in length, e.g., about 7 amino acids in length.

[0579] In some embodiments a peptide may comprise a sequence as set forth in Table 1. In some embodiments a peptide may comprise a sequence as set forth in Table 2A, In some embodiments, a peptide may comprise a sequence as set forth in Table 2B (e.g., a sequence of any of SEQ ID NOs: 201, 205-209, 211-214, 216, 219, 220, 230, 232, 237, 238, 255, 262-265, 274, 283, 286, 290, 291, 293, 301, 306, 307, 308, 309, 314, or 336). In some embodiments, the peptide may comprise a sequence set forth in Table 9. In some embodiments, the peptide may comprise a sequence as set forth in Table 14. In some embodiments, the peptide may comprise a sequence as set forth in Table 15. In some embodiments, the peptide may comprise a sequence as set forth in Table 16. In some embodiments, the peptide is isolated, e.g., recombinant.

TABLE 1
Exemplary Peptide Sequences

| | SEQ | | SEQ | | SEQ | | SEQ |
|---|---|---|---|---|---|---|---|
| Peptide | ID | Peptide | ID | Peptide | ID | Peptide | ID |
| Sequence | NO: | Sequence | NO: | Sequence | NO: | Sequence | NO: |
| TNTQDWHRIAQ | 343 | TTRQDWHRIAQ | 392 | KNNQDWHRIAQ | 441 | RNTQDWHRISQ | 490 |
| TNTKDWHRIAQ | 344 | TNTQDWHRVAN | 393 | TNNQDWHRIAR | 442 | TNQQDWHRIAQ | 491 |
| SNNQDWHRIAQ | 345 | TNTQDWHRISG | 394 | SNTQDWHRVPQ | 443 | RNIQDWHRIAQ | 492 |
| TNKQDWHRIAQ | 346 | TNSQDWHRIAQ | 395 | TNNQDWHRIAK | 444 | TTTQDWHRISQ | 493 |
| TNNEDWHRIAQ | 347 | TYTKDWHRIAQ | 396 | TNTKDWHRIAP | 445 | TSTQDWHRVAQ | 494 |
| SNKODWHRIAQ | 348 | TTTKDWHRIAQ | 397 | TNNRDWHRIAQ | 446 | TSTQDWHRVSQ | 495 |
| SNTQDWHRIAQ | 349 | TNIKDWHRIAQ | 398 | LNNQDWHRIAQ | 447 | TNKQDWHRIEQ | 496 |
| TTNQDWHRIAQ | 350 | TNTKDWHRISQ | 399 | TINQDWHRIAQ | 448 | TNNPDWHRIAQ | 497 |
| TNDQDWHRIAQ | 351 | SNTKDWHRIAQ | 400 | TNNQDWHRIAH | 449 | TITEDWHRIAQ | 498 |
| TTIQDWHRIAQ | 352 | TNNKDWHRIAQ | 401 | TNNQDWHRIGQ | 450 | TNTNDWHRIAQ | 499 |
| RNTQDWHRIAQ | 353 | TNSKDWHRIAQ | 402 | TNNQDWHRFAQ | 451 | SNTQDWHRIPQ | 500 |
| TTKQDWHRIAQ | 354 | TSTKDWHRIAQ | 403 | SNNQDWHRMAQ | 452 | STTQDWHRISQ | 501 |
| TTSQDWHRIAQ | 355 | TNTKDWHRVAQ | 404 | TNHQDWHRIAQ | 453 | TFSQDWHRIAQ | 502 |
| TTDQDWHRIAQ | 356 | TITKDWHRIAQ | 405 | STTQDWHRIAQ | 454 | RNSQDWHRIAQ | 503 |
| TNPSDWHRIAQ | 357 | INTKDWHRIAQ | 406 | TNNQDWHRTAQ | 455 | INTQDWHRIAQ | 504 |
| TNKEDWHRIAQ | 358 | TNAKDWHRIAQ | 407 | SNSQDWHRIAQ | 456 | RNTEDWHRIAQ | 505 |
| TTTQDWHRIAQ | 359 | TNTKDWHRITQ | 408 | TNIQDWHRVAQ | 457 | TNNHDWHRIAQ | 506 |
| TGKQDWHRIAQ | 360 | TNTKDWHRTAQ | 409 | SNTQDWHRVAQ | 458 | SNTQDWHRVSQ | 507 |
| TTAQDWHRIAQ | 361 | TKTKDWHRIAQ | 410 | TNSQDWHRIAG | 459 | TNMQDWHRIAQ | 508 |
| TVKQDWHRIAQ | 362 | STNQDWHRIAQ | 411 | TTTQDWHRVAQ | 460 | TNSQDWHRVPQ | 509 |
| TNYQDWHRIAQ | 363 | TNTKDWHRMAQ | 412 | SNTQDWHRISQ | 461 | RTTQDWHRIAQ | 510 |
| TNTPDWHRIAQ | 364 | TNTKDWHRSAQ | 413 | SNSQDWHRVAQ | 462 | SNIEDWHRIAQ | 511 |
| STKQDWHRIAQ | 365 | TNTKDWHRIGQ | 414 | SNTQDWHRIAG | 463 | TITQDWHRTAQ | 512 |
| TNNQDWHRIAQ | 366 | TNTKDWHRIEQ | 415 | TNSQDWHRVAQ | 464 | TNTSDWHRIAQ | 513 |
| TNTQDWHRIAG | 367 | ANTKDWHRIAQ | 416 | TNNQDWHRSAQ | 465 | TNTQDWHRVTM | 514 |
| TTEQDWHRIAQ | 368 | RNNQDWHRIAQ | 417 | STSQDWHRIAQ | 466 | TNTQDWHRISM | 515 |
| TSKQDWHRIAQ | 369 | TNTKDWHRIVQ | 418 | TNNQDWHRMAQ | 467 | TNTQDWHRVSQ | 516 |
| TNIQDWHRIAQ | 370 | TNNQDWHRISQ | 419 | TNNQDWHRLAQ | 468 | TNTQDWHRIWQ | 517 |
| TNTQDWHRIYQ | 371 | TNNQDWHRVAQ | 420 | TNIQDWHRISQ | 469 | TNTQDWHRIFQ | 518 |
| TYNQDWHRIAQ | 372 | TNTKDWHRNAQ | 421 | TNTQDWHRIPQ | 470 | TNTQDWHRIQQ | 519 |
| TNTQDWHRVPQ | 373 | TGNQDWHRIAQ | 422 | TNTQDWHRTAQ | 471 | KNTQDWHRIAQ | 520 |
| TNTQDWHRIAN | 374 | TNTKDWHRLAQ | 423 | TYIQDWHRIAQ | 472 | TNTQDWHRVQQ | 521 |
| STIQDWHRIAQ | 375 | TNNQDWHRIAN | 424 | TNNQDWHRIVQ | 473 | TNTQDWHRIFM | 522 |
| TTVQDWHRIAQ | 376 | TNTKDWHRIAK | 425 | TNNQDWHRNAQ | 474 | TNLQDWHRIAQ | 523 |
| TGTQDWHRIAQ | 377 | TNTKDWHRIAH | 426 | SGTQDWHRIAQ | 475 | TNTQDWHRIAM | 524 |
| TNTQDWHRINQ | 378 | TSNQDWHRIAQ | 427 | THNQDWHRIAQ | 476 | TITQDWHRIAQ | 525 |
| TNTRDWHRIAQ | 379 | TNNQDWHRIPQ | 428 | TITQDWHRVAQ | 477 | TNTQDWHRIAK | 526 |
| TNTQDWHRVNQ | 380 | THTKDWHRIAQ | 429 | TNTEDWHRVAQ | 478 | TSMQDWHRIAQ | 527 |
| TTLQDWHRIAQ | 38 | TDTKDWHRIAQ | 430 | TTTQDWHRIPQ | 479 | TNTQDWHRISN | 528 |
| TTMQDWHRIAQ | 382 | TNTKDWHRIAR | 431 | SNNQDWHRIAE | 480 | TNTQDWHRIGQ | 529 |
| ANNQDWHRIAQ | 383 | TNEQDWHRIAQ | 432 | TSTQDWHRIAQ | 481 | SYTQDWHRIAQ | 530 |
| SNIQDWHRIAQ | 384 | CNTQDWHRIAQ | 433 | TNTQDWHRVAQ | 482 | TNCQDWHRIAQ | 531 |
| TKNQDWHRIAQ | 385 | TNPKDWHRIAQ | 434 | TNIQDWHRIAN | 483 | TNTQDWHRMAQ | 532 |
| TYTQDWHRIAQ | 386 | TNTKDWHRIAE | 435 | TNSNDWHRIAQ | 484 | SSTQDWHRIAQ | 533 |
| TNKSDWHRIAQ | 387 | TNTKDWHRIAL | 436 | TNTQDWHRSAQ | 485 | TYTQDWHRTAQ | 534 |
| TNTQDWHRVYQ | 388 | INNQDWHRIAQ | 437 | TNIQDWHRIPQ | 486 | TYTQDWHRVAQ | 535 |
| SNTEDWHRIAQ | 389 | TYTEDWHRIAQ | 438 | SNTQDWHRIAN | 487 | TVTQDWHRIAQ | 536 |
| TNTEDWHRIAQ | 390 | TNNQDWHRITQ | 439 | TNTQDWHRISQ | 488 | QNTQDWHRIAQ | 537 |
| TNIEDWHRIAQ | 391 | NNNQDWHRIAQ | 440 | TNNQDWHRIEQ | 489 | TNSQDWHRIPQ | 538 |
| VTNTQDWHRIA | 748 | TTNTQDWHRIAQ | 749 | | | | |
| QT | | T | | | | | |

TABLE 2A
Exemplary Peptide Sequences

| SEQ ID | Amino Acid | SEQ ID | Nucleotide |
|---|---|---|---|
| NO: | Sequence | NO: | Sequence |
| 941 | TQDWHRI | 942 | ACCCAGGACTGGCACAGGAT |
| | | | T |
| 744 | ATNTQDW | 745 | GCTACAAACACCCAGGACTG |
| | HRIAQT | | GCACAGGATTGCGCAGACC |
| 746 | TNTQDWHRI | 747 | ACAAACACCCAGGACTGGCA |
| | | | CAGGATT |

TABLE 2B
Exemplary Peptide Sequences

| | SEQ | | SEQ | | SEQ |
|---|---|---|---|---|---|
| Peptide | ID | Peptide | ID | Peptide | ID |
| Sequence | NO: | Sequence | NO: | Sequence | NO: |
| TNTQDWHRIAQTGWV | 201 | TGTQDWHRIAQTGWV | 220 | TTLQDWHRIAQTGWV | 286 |
| TTNQDWHRIAQTGWV | 205 | STTQDWHRIAQTGWV | 230 | TTTQDWHRVAQTGWV | 290 |
| TTIQDWHRIAQTGWV | 206 | TNTQDWHRVAQTGWV | 232 | TNSQDWHRIAQTGWA | 291 |
| TTSQDWHRIAQTGWV | 207 | TNTQDWHRVSQTGWV | 237 | TNSQDWHRVAQTGWV | 293 |
| TTTQDWHRIAQTGWV | 208 | TSTQDWHRIAQTGWV | 238 | TSTQDWHRIAQTGWA | 301 |
| TTAQDWHRIAQTGWV | 209 | TITQDWHRIAQTGWV | 255 | TTTQDWHRIAQTGWI | 306 |
| TNTQDWHRIAQTGWA | 211 | TNTQDWHRIANNNWV | 262 | TNTQDWHRIAQTGWS | 307 |
| TNTQDWHRIAGTGWV | 212 | TNTQDWHRIYQTGWV | 263 | TTTQDWHRISQTGWV | 308 |
| TNIQDWHRIAQTGWV | 213 | TNTPDWHRIAQTGWV | 264 | TSTQDWHRVAQTGWV | 309 |
| TNTQDWHRIAGSNWV | 214 | TNTQDWHRINQTGWV | 265 | TNTQDWHRISQTGWA | 314 |
| TNTQDWHRVPQTGWV | 216 | TNNQDWHRVAQTGWV | 274 | TVTQDWHRIAQTGWV | 336 |
| TTVQDWHRIAQTGWV | 219 | TNIQDWHRVAQTGWV | 283 | | |

[0580] In some embodiments, a peptide described herein comprises an amino acid sequence having the formula [N1]-[N2]-[N3] (SEQ ID NO: 4681), wherein [N2] comprises the amino acid sequence of DWHR (SEQ ID NO: 4682) and wherein [N1] comprises positions X₁, X₂, X₃, and X₄, wherein position X₄ is Q, K, E, S, P, R, N, H, or a conservative substitution thereof and/or [N3] comprises positions X₅, X₆, and X₇, wherein position X₅ is I, V, T, M, S, N, L, F, or a conservative substitution thereof. In some embodiments, position X₄ of [N1] is Q. In some embodiments, position X₄ of [N1] is K, In some embodiments, position X₅ of [N3] is I, In some embodiments, position X₁ of [N1] is T, S, R, A, I, C, N, K, L, or Q. In some embodiments, position X₂ of [N1] is N, T, G, V, S, Y, K, I, H, D, or F. In some embodiments, position X₃ of [N1] is T, N, K, D, I, S, P, A, Y, E, V, L, M, R, H, Q, or C, In some embodiments. [N1] is or comprises TNTQ (SEQ ID NO: 4688). In some embodiments, [N1] is or comprises TNTK (SEQ ID NO: 4689). In some embodiments. [N1]-[N2] is or comprises TNTQDWHR (SEQ ID NO: 4898). In some embodiments. [N1]-[N2] is or comprises TNTKDWHR (SEQ ID NO: 4899). In some embodiments, position X₆ of [N3] is A, Y, P, N, S, T, G, E, V, W, F, or Q. In some embodiments, position X₇ of [N3] is Q, G, N, K, H, R, E, L, P, or M, In some embodiments. [N3] is or comprises IAQ. In some embodiments. [N2]-[N3] is or comprises DWHRIAQ (SEQ ID NO: 5027). In some embodiments, [N1]-[N2]-[N3] is or comprises TNTQDWHRIAQ (SEQ ID NO: 343). TNTKDWHRIAQ (SEQ ID NO: 344). In some embodiments, the peptide further comprises [N4], wherein [N4] comprises positions X₈, X₉, X₁₀, and X₁, wherein position X₈ is T, S, N, P, A, or I; position X₉ is G, N, D, R, V, A, S, or Q; position X₁₀ is W, S, C, R, L, or G; and/or position X₁₁ is V, A, S, I, C, G, D, F, L, or T, In some embodiments, [N4] is or comprises TGWV (SEQ ID NO: 5066). In some embodiments [N1]-[N2]-[N3]-[N4] is or comprises any one of SEQ ID NOs: 201-245, 247-250, 253-255, 257-265, 268-274, 276-286, 288, 290-297, 299-303, 305-309, 311, 313-319, 323-328, 330-337, 339-342, 539-542, 544, 546, 547, 549-557, 559-589, 592, 593, 595, 596, 598, 599, 601-608, 610-614, 616-622, 625, 628, 630, 631, 633, 636, 638, 639-646, 649, 651-657, 667, 669, 670, 672, 673, 679-683, 685-690, 692, 693, 695, 697, 699-701, 703-705, 708-710, 712-717, 719-723, 728-731, 733-738, 740, or 742. In some embodiments, [N1]-[N2]-[N3]-[N4] is or comprises TNTQDWHRIAQTGWV (SEQ ID NO: 201). In some embodiments [N1]-[N2]-[N3]-[N4] is or comprises TNTKDWHRIAQTGWV (SEQ ID NO: 202).

[0581] In some embodiments, a peptide described herein a peptide described herein comprises an amino acid sequence having the formula [N1]-[N2]-[N3] (SEQ ID NO: 4683), wherein [N2] comprises the amino acid sequence of DWHR (SEQ ID NO: 4682) and wherein [N1] comprises positions X₁, X₂, X₃, and X₄, wherein position X₄ is Q. P, or a conservative substitution thereof; and/or [N3] comprises positions X₅, X₆, and X₇, wherein position X₅ is I, V, or a conservative substitution thereof. In some embodiments, position X₄ of [N1] is Q. In some embodiments, position X₅ of [N3] is I, In some embodiments, position X₅ of [N3] is V, In some embodiments, position X₁ of [N1] is T or S, In some embodiments, position X₂ of [N1] is N, T, G. S, I, or V, In some embodiments, position X₃ of [N1] is T, N, I, S, A, V, or L, In some embodiments, [N1] is or comprises TNTQ (SEQ ID NO: 4688). In some embodiments. [N1]-[N2] is or comprises TNTQDWHR (SEQ ID NO: 4898). In some embodiments, position X₆ of [N3] is A, P, S, Y, or N, In some embodiments, position X₇ of [N3] is Q. G, or N, In some embodiments, [N3] is or comprises IAQ. In some embodiments. [N2]-[N3] is or comprises DWHRIAQ (SEQ ID NO: 5027). In some embodiments. [N1]-[N2]-[N3] is or comprises TNTQDWHRIAQ (SEQ ID NO: 343).). In some embodiments, the peptide further comprises [N4], wherein [N4] comprises positions X₈, X₉, X₁₀, and X₁₁, wherein position X₁₀ is W, In some embodiments, position X₈ of [N4] is T, S, or N, In some embodiments, position X₉ of [N4] is G, or N, In some embodiments, position X₁₁ of [N4] is V, A, I or S. In some embodiments. [N4] is or comprises TGWV (SEQ ID NO: 5066). In some embodiments, [N1]-[N2]-[N3]-[N4] is or comprises any one of SEQ ID NOs: 201, 205-209, 211-214, 216, 219, 220, 230, 232, 237, 238, 255, 262-265, 274, 283, 286, 290, 291, 293, 301, 306, 307, 308, 309, 314, or 336. In some embodiments, [N1]-[N2]-[N3]-[N4] is or comprises TNTQDWHRIAQTGWV (SEQ ID NO: 201).

[0582] In some embodiments. [N1] is present immediately subsequent to [N2]. In some embodiments, [N3] is present immediately subsequent to [N2]. In some embodiments. [N4] is present immediately subsequent to [N3]. In some embodiments, the peptide comprises from N-terminus to C-terminus, [N1]-[N2]-[N3]. In some embodiments, the peptide comprises from N-terminus to C-terminus, [N1]-[N2]-[N3]-[N4].

[0583] In some embodiments, the peptide comprises an amino acid sequence comprising at least 3, 4, 5, 6, 7, 8, 9, 10, 11, 12, 13, or 14 consecutive amino acids from any one of the sequences provided in Tables 1, 2A, 2B, 9, 14, 15, or 16. In some embodiments, the peptide comprises an amino acid sequence comprising at least 3, 4, 5, 6, 7, 8, 9, 10, 11, 12, 13, or 14 consecutive amino acids from any one of SEQ ID NOs: 201, 205-209, 211-214, 216, 219, 220, 230, 232, 237, 238, 255, 262-265, 274, 283, 286, 290, 291, 293, 301, 306, 307, 308, 309, 314, or 336.

[0584] In some embodiments, the 3 consecutive amino acids comprise TQD. In some embodiments, the 4 consecutive amino acids comprise TQDW (SEQ ID NO: 4684). In some embodiments, the 5 consecutive amino acids comprise TQDWH (SEQ ID NO: 4685). In some embodiments, the 6 consecutive amino acids comprise TQDWHR (SEQ ID NO: 4686). In some embodiments, the 7 consecutive amino acids comprise TQDWHRI (SEQ ID NO: 941).

[0585] In some embodiments, 3 consecutive amino acids comprise TNT. In some embodiments, the 4 consecutive amino acids comprise TNTQ (SEQ ID NO: 4688). In some embodiments, the 5 consecutive amino acids comprise TNTQD (SEQ ID NO: 5119). In some embodiments, the 6 consecutive amino acids comprise TNTQDW (SEQ ID NO: 5120). In some embodiments, the 7 consecutive amino acids comprise TNTQDWH (SEQ ID NO: 5121). In some embodiments, the 8 consecutive amino acids comprise TNTQDWHR (SEQ ID NO: 4898). In some embodiments, the 9 consecutive amino acids comprise TNTQDWHRI (SEQ ID NO: 746).

[0586] In some embodiments, the peptide comprises an amino acid sequence comprising at least one, two, or three but no more than four modifications, e.g., substitutions (e.g., conservative substitutions), insertions, or deletions, relative to the amino acid sequence of any one of the sequences provided in Tables 1, 2A, 2B, 9, 14, 15, or 16. In some embodiments, the peptide comprises an amino acid sequence comprising at least one, two, or three but no more than four different amino acids, relative to the amino acid sequence of any one of the sequences provided in Tables 1, 2A, 2B, 9, 14, 15, or 16. In some embodiments, the peptide comprises an amino acid sequence comprising at least one, two, or three but no more than four modifications, e.g., substitutions (e.g., conservative substitutions), insertions, or deletions, relative to the amino acid sequence of any one of SEQ ID NOs: 201, 205-209, 211-214, 216, 219, 220, 230, 232, 237, 238, 255, 262-265, 274, 283, 286, 290, 291, 293, 301, 306, 307, 308, 309, 314, or 336. In some embodiments, the peptide comprises an amino acid sequence comprising at least one, two, or three but no more than four different amino acids, relative to the amino acid sequence of any one of SEQ ID NOs: 201, 205-209, 211-214, 216, 219, 220, 230, 232, 237, 238, 255, 262-265, 274, 283, 286, 290, 291, 293, 301, 306, 307, 308, 309, 314, or 336.

[0587] In some embodiments, the peptide comprises an amino acid sequence comprising at least one, two, or three but no more than four modifications, e.g., substitutions (e.g., conservative substitutions), insertions, or deletions, relative to the amino acid sequence of TQDWHRI (SEQ ID NO: 941). In some embodiments, the peptide comprises an amino acid sequence comprising at least one, two, or three but no more than four different amino acids relative to the amino acid sequence of TQDWHRI (SEQ ID NO: 941).

[0588] In some embodiments, the peptide comprises the amino acid sequence of any of the sequences provided in Tables 1, 2A, 2B, 9, 14, 15, or 16. In some embodiments, the peptide comprises the amino acid sequence of any of S EQ ID NOs: 201, 205-209, 211-214, 216, 219, 220, 230, 232, 237, 238, 255, 262-265, 274, 283, 286, 290, 291, 293, 301, 306, 307, 308, 309, 314, or 336.

[0589] In some embodiments, the peptide comprises an amino acid sequence encoded by a nucleotide sequence described herein, e.g., a nucleotide sequence of Table 2A, In some embodiments, the peptide comprises an amino acid sequence encoded by a nucleotide sequence comprising at least one, two, three, four, five, six, or seven modifications, e.g., substitutions, insertions, or deletions, but no more than ten modifications, e.g., substitutions, insertions, or deletions, relative to the nucleotide sequence of SEQ ID NO: 942. In some embodiments, the peptide comprises an amino acid sequence encoded by a nucleotide sequence comprising at least one, two, three, four, five, six, or seven, but no more than ten different nucleotides, relative to the nucleotide sequence of SEQ ID NO: 942. In some embodiments, the peptide comprises an amino acid sequence encoded by the nucleotide sequence of SEQ ID NO: 942, or a nucleotide sequence substantially identical (e.g., having at least 70%, 75%, 80%, 85%, 90%, 92%, 95%, 97%, 98%, or 99% sequence identity) thereto.

[0590] In some embodiments, the nucleotide sequence encoding a peptide described herein comprises a nucleotide sequence described herein, e.g., as described in Table 2A, In some embodiments, the nucleotide sequence encoding a peptide described herein is codon optimized. In some embodiments, the nucleotide sequence encoding a peptide described herein is isolated, e.g., recombinant.

[0591] In some embodiments the nucleotide sequence encoding a peptide described herein comprises the nucleotide sequence of SEQ ID NO: 942, or a nucleotide sequence comprising at least one, two, three, four, five, six, or seven modifications, e.g., substitutions, insertions, or deletions, but no more than ten modifications, e.g., substitutions, insertions, or deletions, relative to the nucleotide sequence of SEQ ID NO: 942. In some embodiments, the nucleotide sequence encoding a peptide described herein comprises a nucleotide sequence comprising at least one, two, three, four, five, six, or seven, but no more than ten different nucleotides, relative to the nucleotide sequence of SEQ ID NO: 942. In some embodiments the nucleic acid sequence encoding a peptide described herein comprises a nucleotide sequence comprising the nucleotide sequence of SEQ ID NO: 942, or a nucleotide sequence substantially identical (e.g., having at least 70%, 75%, 80%, 85%, 90%, 92%, 95%, 97%, 98%, or 99% sequence identity) thereto.

[0592] In some embodiments, a peptide described herein is fused or coupled, e.g., conjugated, to an active agent. In some embodiments, the active agent is a therapeutic agent. In some embodiments, the active agent comprises a therapeutic protein, an antibody molecule, an enzyme, one or more components of a genome editing system, an Fc polypeptide fused or coupled (e.g., covalently or non covalently) to a therapeutic agent, and/or an RNAi agent (e.g., a dsRNA, antisense oligonucleotide (ASO), siRNA, shRNA, pre-miRNA, pri-miRNA, miRNA, stRNA, lncRNA, piRNA, or snoRNA). In some embodiments, the therapeutic agent is an antibody. In some embodiments, a peptide described herein is fused or coupled, e.g., conjugated (e.g., directly or indirectly) to the Fc region of the antibody, e.g., at the C-terminus of the Fc region or the N-terminus of the Fc region. In some embodiments, the therapeutic agent is an RNAi agent. In some embodiments, the RNAi agent is a siRNA or an ASO. In some embodiments, the ASO or siRNA comprises at least one (e.g., one or more or all) modified nucleotides. In some embodiments, a peptide described herein is fused or coupled, e.g., conjugated (e.g., directly or indirectly via a linker), to at least one strand of the RNAi agent. In some embodiments, a peptide described herein is conjugated, e.g., directly or indirectly via a linker, to the C-terminus of at least one strand of the RNAi agent. In some embodiments, a peptide described herein is conjugated, e.g., directly or indirectly via a linker, to an internal nucleotide of at least one strand of the RNAi agent. In some embodiments, the at least one strand is the sense strand. In some embodiments, the therapeutic agent modulates, e.g., inhibits, decreases, or increases, expression of a CNS related gene, mRNA, and/or protein.

[0593] In some embodiments, the active agent is a diagnostic agent. In some embodiments, the diagnostic agent is or comprises an imaging agent (e.g., a protein or small molecule compound coupled to a detectable moiety). In some embodiments, the imaging agent comprises a PET or MRI ligand, or an antibody molecule coupled to a detectable moiety. In some embodiments, the detectable moiety is or comprises a radiolabel, a fluorophore, a chromophore, or an affinity tag. In some embodiments, the radiolabel is or comprises tc99m, iodine-123, a spin label, iodine-131, indium-111, fluorine-19, carbon-13, nitrogen-15, oxygen-17, gadolinium, manganese, or iron. In some embodiments, the active agent is a small molecule. In some embodiments, the active agent is a ribonucleic acid complex (e.g., a Cas9/gRNA complex), a plasmid, a closed-end DNA, a circ-RNA, or an mRNA.

[0594] In some embodiments, at least 1-5, e.g., at least 1, 2, 3, 4, or 5, peptides are fused or coupled, e.g., conjugated, to an active agent, e.g., a therapeutic agent or a diagnostic agent. In some embodiments, the at least 1-5, e.g., at least 1, 2, 3, 4, or 5, peptides comprise the same amino acid sequence. In some embodiments, the at least 1-5, e.g., at least 1, 2, 3, 4, or 5, peptides comprise different amino acid sequences. In some embodiments, the at least 1-5, e.g., at least 1, 2, 3, 4, or 5, peptides are present in tandem (e.g., connected directly or indirectly via a linker) or in a multimeric configuration. In some embodiments, the peptide comprises an amino acid sequence of at least 3, 4, 5, 6, 7, 8, 9, 10, 11, 12, 15, 20, 25, 30, or 35 amino acids in length.

[0595] In some embodiments, the peptide covalently linked, e.g., directly or indirectly via a linker, to the active agent. In some embodiments, the peptide is conjugated to the active agent via a linker. In some embodiments, the linker is a cleavable linker or a non-cleavable linker. In some embodiments, the cleavable linker is a pH sensitive linker or an enzyme sensitive linker. In some embodiments, the pH sensitive linker comprises a hydrazine/hydrazone linker or a disulfide linker. In some embodiments, the enzyme sensitive linker comprises a peptide based linker, e.g., a peptide linker sensitive to a protease (e.g., a lysosomal protease); or a beta-glucuronide linker. In some embodiments, the non-cleavable linker is a linker comprising a thioether group or a maleimidocaproyl group. In some embodiments, the peptide and the active agent are fused or coupled post-translationally, e.g., using click chemistry. In some embodiments, the peptide and the active agent are fused or couple via chemically induced dimerization. In some embodiments, the peptide is present N-terminal relative to the active agent. In some embodiments, the peptide is present C-terminal relative to the active agent.

[0596] In some embodiments, the peptide is present or coupled to a carrier. In some embodiments, the carrier comprises an exosome, a microvesicle, or a lipid nanoparticle (LNP). In some embodiments, the carrier comprises a therapeutic agent (e.g., an RNAi agent (e.g., an dsRNA, a siRNA, a shRNA, a pre-miRNA, a pri-miRNA, a miRNA, a stRNA, a lncRNA, a piRNA, an antisense oligonucleotide agent (ASO), or a snoRNA), an mRNA, a ribonucleoprotein complex (e.g., a Cas9/gRNA complex), or a circRNA). In some embodiments, the peptide is present on the surface of the carrier. In some embodiments, at least 10%, 20%, 30%, 40%, 50%, 60%, 70%, or 80% of the surface of the carrier comprises at least 1-5, e.g., at least 1, 2, 3, 4, or 5, peptides described herein.

[0597] The present disclosure also provides a nucleic acid or polynucleotide encoding any of the peptides described herein and AAV capsid variants, AAV particles, vectors, and cells comprising the same.

### AAV Capsid Variant

[0598] In some embodiments, an AAV particle described herein comprises an AAV capsid variant, e.g., an AAV capsid variant described herein (e.g., an AAV capsid variant comprising a peptide described herein). In some embodiments, an AAV capsid variant comprises a peptide as set forth in any of Tables 1, 2A, 2B, 9, 14, 15, or 16.

[0599] In some embodiments, an AAV capsid variant described herein comprises an amino acid sequence having the formula [N1]-[N2]-[N3] (SEQ ID NO: 4681), wherein [N2] comprises the amino acid sequence of DWHR (SEQ ID NO: 4682) and wherein [N1] comprises positions X₁, X₂, X₃, and X₄, wherein position X₄ is Q, K, E, S, P, R, N, H, or a conservative substitution thereof and/or [N3] comprises positions X₅, X₆, and X₇, wherein position X₅ is I, V, T, M, S, N, L, F, or a conservative substitution thereof. In some embodiments, position X₄ of [N1] is Q. In some embodiments, position X₄ of [N1] is K, In some embodiments, position X₅ of [N3] is I, In some embodiments, position X₁ of [N1] is T, S, R, A, I, C, N, K, L, or Q. In some embodiments, position X₂ of [N1] is N, T, G, V, S, Y, K, I, H, D, or F. In some embodiments, position X₃ of [N1] is T, N, K, D, I, S, P, A, Y, E, V, L, M, R, H, Q, or C, In some embodiments, [N1] is or comprises TNTQ (SEQ ID NO: 4688). In some embodiments. [N1] is or comprises TNTK (SEQ ID NO: 4689). In some embodiments, [N1]-[N2] is or comprises TNTQDWHR (SEQ ID NO: 4898). In some embodiments, [N1]-[N2] is or comprises TNTKDWHR (SEQ ID NO: 4899). In some embodiments, position X₆ of [N3] is A, Y, P, N, S, T, G, E, V, W, F, or Q. In some embodiments, position X₇ of [N3] is Q, G, N, K, H, R, E, L, P, or M, In some embodiments. [N3] is or comprises IAQ. In some embodiments. [N2]-[N3] is or comprises DWHRIAQ (SEQ ID NO: 5027). In some embodiments. [N1]-[N2]-[N3] is or comprises TNTQDWHRIAQ (SEQ ID NO: 343). TNTKDWHRIAQ (SEQ ID NO: 344). In some embodiments, the AAV capsid variant further comprises [N4], wherein [N4] comprises positions X₈, X₉, X₁₀, and X₁₁, wherein position X₈ is T, S, N, P, A, or I; position X₉ is G. N, D, R, V, A, S, or Q; position X 10 is W, S, C, R, L, or G; and/or position X₁₁ is V, A, S, I, C, G. D, F. L, or T, In some embodiments, [N4] is or comprises TGWV (SEQ ID NO: 5066). In some embodiments [N1]-[N2]-[N3]-[N4] is or comprises any one of SEQ ID NOs: 201-245, 247-250, 253-255, 257-265, 268-274, 276-286, 288, 290-297, 299-303, 305-309, 311, 313-319, 323-328, 330-337, 339-342, 539-542, 544, 546, 547, 549-557, 559-589, 592, 593, 595, 596, 598, 599, 601-608, 610-614, 616-622, 625, 628, 630, 631, 633, 636, 638, 639-646, 649, 651-657, 667, 669, 670, 672, 673, 679-683, 685-690, 692, 693, 695, 697, 699-701, 703-705, 708-710, 712-717, 719-723, 728-731, 733-738, 740, or 742. In some embodiments, [N1]-[N2]-[N3]-[N4] is or comprises TNTQDWHRIAQTGWV (SEQ ID NO: 201). In some embodiments [N1]-[N2]-[N3]-[N4] is or comprises TNTKDWHRIAQTGWV (SEQ ID NO: 202).

[0600] In some embodiments, an AAV capsid variant described herein a peptide described herein comprises an amino acid sequence having the formula [N1]-[N2]-[N3] (SEQ ID NO: 4683), wherein [N2] comprises the amino acid sequence of DWHR (SEQ ID NO: 4682) and wherein [N1] comprises positions X₁, X₂, X₃, and X₄, wherein position X₄ is Q. P, or a conservative substitution thereof; and/or [N3] comprises positions X₅, X₆, and X₇, wherein position X₅ is I, V, or a conservative substitution thereof. In some embodiments, position X₄ of [N1] is Q. In some embodiments, position X₅ of [N3] is I, In some embodiments, position X₅ of [N3] is V, In some embodiments, position X₁ of [N1] is T or S, In some embodiments, position X₂ of [N1] is N, T, G, S, I, or V, In some embodiments, position X₃ of [N1] is T, N, I, S, A, V, or L, In some embodiments, [N1] is or comprises TNTQ (SEQ ID NO: 4688). In some embodiments. [N1]-[N2] is or comprises TNTQDWHR (SEQ ID NO: 4898). In some embodiments, position X₆ of [N3] is A, P, S, Y, or N, In some embodiments, position X₇ of [N3] is Q. G. or N, In some embodiments, [N3] is or comprises IAQ. In some embodiments. [N2]-[N3] is or comprises DWHRIAQ (SEQ ID NO: 5027). In some embodiments, [N1]-[N2]-[N3] is or comprises TNTQDWHRIAQ (SEQ ID NO: 343).). In some embodiments, the AAV capsid variant further comprises [N4], wherein [N4] comprises positions X₈. X₉, X₁₀, and X₁₁, wherein position X₁₀ is W, In some embodiments, position X₈ of [N4] is T, S, or N. In some embodiments, position X₉ of [N4] is G, or N, In some embodiments, position X₁₁ of [N4] is V. A, I or S, In some embodiments. [N4] is or comprises TGWV (SEQ ID NO: 5066). In some embodiments. [N1]-[N2]-[N3]-[N4] is or comprises any one of SEQ ID NOs: 201, 205-209, 211-214, 216, 219, 220, 230, 232, 237, 238, 255, 262-265, 274, 283, 286, 290, 291, 293, 301, 306, 307, 308, 309, 314, or 336. In some embodiments, [N1]-[N2]-[N3]-[N4] is or comprises TNTQDWHRIAQTGWV (SEQ ID NO: 201).

[0601] In some embodiments. [N1]-[N2]-[N3] is present in loop VIII of the AAV capsid variant. In some embodiments [N4] is present in loop VIII of the AAV capsid variant. In some embodiments, [N1]-[N2]-[N3]-[N4] is present in loop VIII of the AAV capsid variant. In some embodiments, loop VIII comprises positions 581-593, numbered according to SEQ ID NO: 138. In some embodiments, loop VIII comprises positions 580-599, numbered according to SEQ ID NO: 138.

[0602] In some embodiments. [N1] replaces positions 582-585 (e.g., T582, N583, H584, and Q585), numbered according to SEQ ID NO: 138. In some embodiments. [N1] corresponds to positions 582-585 of SEQ ID NO: 981. In some embodiments. [N1] corresponds to positions 582-585 (e.g., T582, N583, H584, Q585) of SEQ ID NO: 138. In some embodiments. [N1] is present at positions 582-585, numbered according to SEQ ID NO: 981. In some embodiments, X₁ of [N1] is present at position 582, X₂ of [N1] is present at position 583, X₃ of [N1] is present at position 584, and X₄ of [N1] is present at position 585, numbered according to SEQ ID NO: 981. In some embodiments. [N2] replaces positions 586-589 (e.g., S586, A587, Q588, and A589), numbered according to the amino acid sequence of SEQ ID NO: 138. In some embodiments. [N2] corresponds to positions 586-589 (e.g., D586, W587, H588, and R589) of SEQ ID NO: 981. In some embodiments. [N2] is present at positions 586-589, numbered according to SEQ ID NO: 981. In some embodiments. [N1]-[N2] replaces to positions 582-589 (e.g., T582, N583, H584, Q585, S586, A587, Q588. A589), numbered according to SEQ ID NO: 138. In some embodiments, [N1]-[N2] corresponds to positions 582-589 (e.g., T582, N583, T584, Q585, D586, W587, H588, R589) of SEQ ID NO: 981. In some embodiments. [N1]-[N2] is present at positions 582-589, numbered according to SEQ ID NO: 981. In some embodiments. [N3] replaces positions 590-592 (e.g., Q590, A591, and Q592), numbered according to SEQ ID NO: 138. In some embodiments. [N3] corresponds to positions 590-592 (e.g., 1590, A591, and Q592) of SEQ ID NO: 981. In some, embodiments, [N3] is present at positions 590-592, numbered according to SEQ ID NO: 981. In some embodiments, X₅ of [N3] is present at position 590, X₆ of [N3] is present at position 591, and X₇ of [N3] is present at position 592, numbered according to SEQ ID NO: 981. In some embodiments. [N2]-[N3] replaces positions 586-592 (e.g., S586, A587, Q588, A589, Q590, A591, and Q592), numbered according to SEQ ID NO: 138. In some embodiments. [N2]-[N3] corresponds to positions 586-592 (e.g., D586, W587, H588, R589, 1590, A591, and Q592) of SEQ ID NO: 981. In some embodiments, [N2]-[N3] is present at positions 586-592, numbered according to SEQ ID NO: 981. In some embodiments, [N1]-[N2]-[N3] replaces positions 582-592 (e.g., T582, N583, H584, Q585, S586, A587, Q588, A589, Q590, A591, Q592), numbered according to SEQ ID NO: 138. In some embodiments, [N1]-[N2]-[N3] corresponds to positions 582-592 (e.g., T582, N583, T584, Q585, D586, W587, H588, R589, 1590, A591, Q592) of SEQ ID NO: 981. In some embodiments, [N1]-[N2]-[N3] is present at positions 582-592, numbered according to SEQ ID NO: 981. In some embodiments. [N4] replaces positions 593-596 (e.g., T593, G594, W595, and V596), numbered according to SEQ ID NO: 138. In some embodiments, [N4] corresponds to positions 593-596 (e.g., T593, G594, W595, and V596) of SEQ ID NO: 138 or 981. In some embodiments. [N4] is present at positions 593-596, numbered according to SEQ ID NO: 981. In some embodiments. X₈ of [N4] is present at position 593, X₉ of [N4] is present at position 594, X₁₀ of [N4] is present at position 595, and X₁₁ of [N4] is present at position 596, numbered according to SEQ ID NO: 981. In some embodiments. [N2]-[N3]-[N4] replaces positions 586-596 (e.g., S586, A587, Q588, A589, Q590, A591, Q592, T593, G594, W595, and V596), numbered according to SEQ ID NO: 138. In some embodiments. [N2]-[N3]-[N4] corresponds to positions 586-596 (e.g., D586, W587, H588, R589, 1590, A591, Q592, T593, G594, W595, and V596) of SEQ ID NO: 981. In some embodiments. [N2]-[N3]-[N4] is present at positions 586-596, numbered according to SEQ ID NO: 981. In some embodiments. [N1]-[N2]-[N3]-[N4] replaces positions 582-596 (e.g., T582, N583, H584, Q585, S586, A587, Q588, A589, Q590, A591, Q592, T593, G594, W595, and V596), numbered according to SEQ ID NO: 138. In some embodiments, [N1]-[N2]-[N3]-[N4] corresponds to positions 582-596 (e.g., T582, N583, T584, Q585, D586, W587, H588, R589, 1590, A591, Q592, T593, G594, W595, and V596) of SEQ ID NO: 981. In some embodiments. [N1]-[N2]-[N3]-[N4] is present at positions 582-596, numbered according to the SEQ ID NO: 981.

[0603] In some embodiments, the AAV capsid variant comprises from N-terminus to C-terminus, [N1]-[N2]-[N3]. In some embodiments, the AAV capsid variant comprises from N-terminus to C-terminus. [N1]-[N2]-[N3]-[N4].

[0604] In some embodiments, an AAV capsid variant described herein comprises an amino acid sequence comprising at least 3, 4, 5, 6, 7, 8, 9, 10, 11, 12, 13, or 14 consecutive amino acids from any one of the sequences provided in Tables 1, 2A, 2B, 9, 14, 15, or 16. In some embodiments, the AAV capsid variant comprises an amino acid sequence comprising at least 3, 4, 5, 6, 7, 8, 9, 10, 11, 12, 13, or 14 consecutive amino acids from any one of SEQ ID NOs: 201, 205-209, 211-214, 216, 219, 220, 230, 232, 237, 238, 255, 262-265, 274, 283, 286, 290, 291, 293, 301, 306, 307, 308, 309, 314, or 336. In some embodiments, the amino acid sequence is present in loop VIII. In some embodiments, loop VIII comprises positions 581-593, numbered according to SEQ ID NO: 138. In some embodiments, loop VIII comprises positions 580-599, numbered according to SEQ ID NO: 138. In some embodiments, the amino acid sequence replaces 1, 2, 3, 4, 5, 6, 7, 8, 9, 10, 11, 12, 13, 14, or all of positions 582 (e.g., T582), 583 (e.g., N583), 584 (e.g., H584), 585 (e.g., Q585), 586 (e.g., S586), 587 (e.g., A587), 588 (e.g., Q588), 589 (e.g., A589), 590 (e.g., Q590), 591 (e.g., A591), 592 (e.g., Q592), 593 (e.g., T593), 594 (e.g., G594), 595 (e.g., W595), and/or 596 (e.g., V596), numbered according to SEQ ID NO: 138. In some embodiments, the amino acid sequence is present at 3, 4, 5, 6, 7, 8, 9, 10, 11, 12, 13, 14, or all of positions 582, 583, 584, 585, 586, 587, 588, 589, 590, 591, 592, 593, 594, 595, and/or 596, numbered according to SEQ ID NO: 981. In some embodiments, the AAV capsid variant comprises one or more amino acid substitutions at positions 582 (e.g., T582), 583 (e.g., N583), 584 (e.g., H584), 585 (e.g., Q585), 586 (e.g., S586), 587 (e.g., A587), 588 (e.g., Q588), 589 (e.g., A589), 590 (e.g., Q590), 591 (e.g., A591), 592 (e.g., Q592), 593 (e.g., T593), 594 (e.g., G594), 595 (e.g., W595), and/or 596 (e.g., V596), numbered according to SEQ ID NO: 138.

[0605] In some embodiments, the 3 consecutive amino acids comprise TQD. In some embodiments, the 4 consecutive amino acids comprise TQDW (SEQ ID NO: 4684). In some embodiments, the 5 consecutive amino acids comprise TQDWH (SEQ ID NO: 4685). In some embodiments, the 6 consecutive amino acids comprise TQDWHR (SEQ ID NO: 4686). In some embodiments, the 7 consecutive amino acids comprise TQDWHRI (SEQ ID NO: 941).

[0606] In some embodiments, 3 consecutive amino acids comprise TNT. In some embodiments, the 4 consecutive amino acids comprise TNTQ (SEQ ID NO: 4688). In some embodiments, the 5 consecutive amino acids comprise TNTQD (SEQ ID NO: 5119). In some embodiments, the 6 consecutive amino acids comprise TNTQDW (SEQ ID NO: 5120). In some embodiments, the 7 consecutive amino acids comprise TNTQDWH (SEQ ID NO: 5121). In some embodiments, the 8 consecutive amino acids comprise TNTQDWHR (SEQ ID NO: 4898). In some embodiments, the 9 consecutive amino acids comprise TNTQDWHRI (SEQ ID NO: 746).

[0607] In some embodiments, an AAV capsid variant described herein comprises an amino acid sequence comprising at least one, two, or three but no more than four modifications, e.g., substitutions (e.g., conservative substitutions), insertions, or deletions, relative to the amino acid sequence of any one of the sequences provided in Tables 1, 2A, 2B, 9, 14, 15, or 16. In some embodiments, the AAV capsid variant comprises an amino acid sequence comprising at least one, two, or three but no more than four different amino acids, relative to the amino acid sequence of any one of the sequences provided in Tables 1, 2A, 2B, 9, 14, 15, or 16. In some embodiments, the AAV capsid variant comprises an amino acid sequence comprising at least one, two, or three but no more than four modifications, e.g., substitutions (e.g., conservative substitutions), insertions, or deletions, relative to the amino acid sequence of any one of SEQ ID NOs: 945-980 or 985-986. In some embodiments, the AAV capsid variant comprises an amino acid sequence comprising at least one, two, or three but no more than four different amino acids, relative to the amino acid sequence of any one of SEQ ID NOS: 201, 205-209, 211-214, 216, 219, 220, 230, 232, 237, 238, 255, 262-265, 274, 283, 286, 290, 291, 293, 301, 306, 307, 308, 309, 314, or 336. In some embodiments, the amino acid sequence is present in loop VIII. In some embodiments, loop VIII comprises positions 581-593, numbered according to SEQ ID NO: 138. In some embodiments, loop VIII comprises positions 580-599, numbered according to SEQ ID NO: 138. In some embodiments, the amino acid sequence replaces 1, 2, 3, 4, 5, 6, 7, 8, 9, 10, 11, 12, 13, 14, or all of positions 582 (e.g., T582), 583 (e.g., N583), 584 (e.g., H584), 585 (e.g., Q585), 586 (e.g., S586), 587 (e.g., A587), 588 (e.g., Q588), 589 (e.g., A589), 590 (e.g., Q590), 591 (e.g., A591), 592 (e.g., Q592), 593 (e.g., T593), 594 (e.g., G594), 595 (e.g., W595), and/or 596 (e.g., V596), numbered according to SEQ ID NO: 138. In some embodiments, the amino acid sequence is present at 3, 4, 5, 6, 7, 8, 9, 10, 11, 12, 13, 14, or all of positions 582, 583, 584, 585, 586, 587, 588, 589, 590, 591, 592, 593, 594, 595, and/or 596, numbered according to SEQ ID NO: 981.

[0608] In some embodiments, the AAV capsid variant comprises an amino acid sequence comprising at least one, two, or three but no more than four modifications, e.g., substitutions (e.g., conservative substitutions), insertions, or deletions, relative to the amino acid sequence of TQDWHRI (SEQ ID NO: 941). In some embodiments, the AAV capsid variant comprises an amino acid sequence comprising at least one, two, or three, but no more than four different amino acids from the amino acid sequence of TQDWHRI (SEQ ID NO: 941).

[0609] In some embodiments, the AAV capsid variant, comprises the amino acid sequence of any of the sequences provided in Tables 1, 2A, 2B, 9, 14, 15, or 16. In some embodiments, the peptide comprises the amino acid sequence of any of SEQ ID NOs: 201, 205-209, 211-214, 216, 219, 220, 230, 232, 237, 238, 255, 262-265, 274, 283, 286, 290, 291, 293, 301, 306, 307, 308, 309, 314, or 336. In some embodiments, the amino acid sequence is present in loop VIII. In some embodiments, loop VIII comprises positions 581-593, numbered according to SEQ ID NO: 138. In some embodiments, loop VIII comprises positions 580-599, numbered according to SEQ ID NO: 138. In some embodiments, the amino acid sequence replaces 1, 2, 3, 4, 5, 6, 7, 8, 9, 10, 11, 12, 13, 14, or all of positions 582 (e.g., T582), 583 (e.g., N583), 584 (e.g., H584), 585 (e.g., Q585), 586 (e.g., S586), 587 (e.g., A587), 588 (e.g., Q588), 589 (e.g., A589), 590 (e.g., Q590), 591 (e.g., A591), 592 (e.g., Q592), 593 (e.g., T593), 594 (e.g., G594), 595 (e.g., W595), and/or 596 (e.g., V596), numbered according to SEQ ID NO: 138. In some embodiments, the amino acid sequence is present at 3, 4, 5, 6, 7, 8, 9, 10, 11, 12, 13, 14, or all of positions 582, 583, 584, 585, 586, 587, 588, 589, 590, 591, 592, 593, 594, 595, and/or 596, numbered according to SEQ ID NO: 981. In some embodiments, the amino acid sequence is present at 3, 4, 5, 6, 7, 8, 9, 10, 11, 12, 13, 14, 15, or all of positions 581, 582, 583, 584, 585, 586, 587, 588, 589, 590, 591, 592, 593, 594, 595, and/or 596, numbered according to SEQ ID NO: 981. In some embodiments, the AAV capsid variant comprises one or more amino acid substitutions at positions 582 (e.g., T582), 583 (e.g., N583), 584 (e.g., H584), 585 (e.g., Q585), 586 (e.g., S586), 587 (e.g., A587), 588 (e.g., Q588), 589 (e.g., A589), 590 (e.g., Q590), 591 (e.g., A591), 592 (e.g., Q592), 593 (e.g., T593), 594 (e.g., G594), 595 (e.g., W595), and/or 596 (e.g., V596), numbered according to SEQ ID NO: 138.

[0610] In some embodiments, the AAV capsid variant (e.g., an AAV capsid variant described herein), comprises an amino acid sequence encoded by the nucleotide sequence of SEQ ID NO: 942, or a nucleotide sequence substantially identical (e.g., having at least 70%, 75%, 80%, 85%, 90%, 92%, 95%, 97%, 98%, or 99% sequence identity) thereto. In some embodiments, the AAV capsid variant described herein, comprises an amino acid sequence encoded by the nucleotide sequence of SEQ ID NO: 942, or a nucleotide sequence comprising at least one, two, three, four, five, six, or seven modifications, e.g., substitutions (e.g., conservative substitutions), insertions, or deletions, but no more than ten modifications, e.g., substitutions (e.g., conservative substitutions), insertions, or deletions, relative to the nucleotide sequence of SEQ ID NO: 942. In some embodiments, the AAV capsid variant comprises an amino acid sequence encoded by a nucleotide sequence comprising at least one, two, three, four, five, six, or seven, but no more than ten different nucleotides relative to the nucleotide sequence of SEQ ID NO: 942.

[0611] In some embodiments, an AAV capsid variant described herein comprises the amino acid sequence of TQDWHRI (SEQ ID NO: 941), wherein the amino acid sequence replaces positions 584-590 (e.g., H584, Q585, S586, A587, Q588, A589, Q590), numbered according to the amino acid sequence of SEQ ID NO: 138. In some embodiments, an AAV capsid variant described herein comprises the amino acid sequence of TQDWHRI (SEQ ID NO: 941), wherein the amino acid sequence corresponds to positions 584-590 (e.g., T584, Q585, D586, W587, H588, R589, 1590) of SEQ ID NO: 981. In some embodiments, an AAV capsid variant described herein comprises the amino acid sequence of TQDWHRI (SEQ ID NO: 941), wherein the amino acid sequence is present at positions 584-590, numbered according to SEQ ID NO: 981. In some embodiments, an AAV capsid variant described herein comprises the amino acid sequence of TQDWHRI (SEQ ID NO: 941), wherein the amino acid sequence is present at positions 584-590, numbered according to SEQ ID NO: 138.

[0612] In some embodiments, the AAV capsid variant further comprises an amino acid other than A at position 581, numbered according to SEQ ID NO: 138 or 981. In some embodiments, the AAV capsid variant further comprises the amino acid T at position 581, numbered according to SEQ ID NO: 138 or 981. In some embodiments, the AAV capsid variant further comprises the amino acid V at position 581, numbered according to SEQ ID NO: 138 or 981. In some embodiments, the AAV capsid variant comprises the substitutions A581T or A581V, numbered according to SEQ ID NO: 138 or 981.

[0613] In some embodiments, an AAV capsid variant described herein comprises one, two, three, four, five, or all of an amino acid other than H at position 584 (e.g., T), S at position 586 (e.g., D), A at position 587 (e.g., W), Q at position 588 (e.g., H), A at position 589 (e.g., R), and/or Q at position 590 (e.g., I), numbered according to SEQ ID NO: 138. In some embodiments, the AAV capsid variant comprises an amino acid other than H at position 584 (e.g., T), S at position 586 (e.g., D), A at position 587 (e.g., W), Q at position 588 (e.g., H), A at position 589 (e.g., R), and Q at position 590 (e.g., I), numbered according to SEQ ID NO: 138. In some embodiments, an AAV capsid variant described herein comprises the amino acid T at position 584, D at position 586, W at position 587, H at position 588, R at position 589, and I at position 590, numbered according to SEQ ID NO: 138 or 981.

[0614] In some embodiments, an AAV capsid variant described herein comprises one, two, three, four, five, or all of the amino acid T at position 584, D at position 586, W at position 587, H at position 588. R at position 589, and/or I at position 590, numbered according to SEQ ID NO: 138 or 981. In some embodiments, the AAV capsid variant comprises the amino acid T at position 584, D at position 586, W at position 587, H at position 588, R at position 589, and I at position 590, numbered according to SEQ ID NO: 138 or 981.

[0615] In some embodiments, an AAV capsid variant described herein comprises one, two, three, four, five, or all of the substitutions H584T, S586D, A587W, Q588H, A589R, and/or Q590I, numbered according to SEQ ID NO: 138. In some embodiments, the AAV capsid variant comprises the substitutions H584T, S586D, A587W, Q588H, A589R, and Q590I, numbered according to SEQ ID NO: 138 or 981.

[0616] In some embodiments, an AAV capsid variant described herein comprises the amino acid Q at position 585, numbered according to SEQ ID NO: 138 or 981.

[0617] In some embodiments, an AAV capsid variant described herein comprises an amino acid other than Q at position 585, numbered according to SEQ ID NO: 138. In some embodiments, an AAV capsid variant described herein comprises the amino acid K at position 585, numbered according to SEQ ID NO: 138.

[0618] In some embodiments, an AAV capsid variant described herein comprises an amino acid other than Q at position 590, numbered according to SEQ ID NO: 138. In some embodiments, the AAV capsid variant comprises the amino acid I at position 590, numbered according to SEQ ID NO: 138. In some embodiments, the AAV capsid variant comprises the amino acid V at position 590, numbered according to SEQ ID NO: 138.

[0619] In some embodiments, an AAV capsid variant described herein comprises the amino acid sequence of TQDWHRI (SEQ ID NO: 941), wherein the amino acid sequence of TQDWHRI (SEQ ID NO: 941) is present in the AAV capsid variant at positions 584-590, numbered according to SEQ ID NO: 981. In some embodiments, an AAV capsid variant described herein comprises the amino acid sequence of TQDWHRI (SEQ ID NO: 941), wherein the amino acid sequence of TQDWHRI (SEQ ID NO: 941) is present in the AAV capsid variant at positions 584-590, numbered according to SEQ ID NO: 138.

[0620] In some embodiments, an AAV capsid variant described herein comprises the amino acid W at position 595, numbered according to SEQ ID NO: 138 or 981.

[0621] In some embodiments, the AAV capsid variant, further comprises a substitution at position K449, e.g., a K449R substitution, numbered according to SEQ ID NO: 138. In some embodiments, the AAV capsid variant, further comprises an amino acid other than K at position 449 (e.g., R), numbered according to the amino acid sequence of SEQ ID NO: 138. In some embodiments, the AAV capsid variant comprises an R at position 449, numbered according to the amino acid sequence of SEQ ID NO: 138. In some embodiments, the AAV capsid variant further comprises a modification, e.g., an insertion, substitution, and/or deletion in loop I, II, IV, and/or VI.

[0622] In some embodiments, the AAV capsid variant, further comprises an amino acid sequence comprising at least one, two or three modifications, e.g., substitutions (e.g., conservative substitutions), insertions, or deletions, but not more than 30, 20 or 10 modifications, e.g., substitutions (e.g., conservative substitutions), insertions, or deletions, of the amino acid sequence of SEQ ID NO: 138. In some embodiments, the AAV capsid variant, further comprises an amino acid sequence comprising at least one, two or three, but not more than 30, 20 or 10 amino acids that differ from the amino acid sequence of SEQ ID NO: 138. In some embodiments, the AAV capsid variant further comprises the amino acid sequence of SEQ ID NO: 138, or an amino acid sequence with at least 70% (e.g., at least 80, 85, 90, 95, 96, 97, 98, or 99%) sequence identity thereto.

[0623] In some embodiments, the AAV capsid variant further comprises (a) a VP1 protein comprising the amino acid sequence of SEQ ID NO: 138 or 981; (b) a VP2 protein comprising the amino acid sequence of positions 138-736 of SEQ ID NO: 138 or 981; (c) a VP3 protein comprising the amino acid sequence of positions 203-736 of SEQ ID NO: 138 or 981; or (d) an amino acid sequence with at least 70% (e.g., at least 80, 85, 90, 95, 96, 97, 98, or 99%) sequence identity to any of the amino acid sequences in (a)-(c), an amino acid sequence comprising at least one, two or three, but not more than 30, 20 or 10 different amino acids relative to any of the amino acid sequences in (a)-(c), or an amino acid sequence comprising at least one, two or three modifications, e.g., substitutions (e.g., conservative substitutions), insertions, or deletions, but not more than 30, 20 or 10 modifications, e.g., substitutions (e.g., conservative substitutions), insertions, or deletions, relative to any of the amino acid sequences in (a)-(c).

[0624] In some embodiments, the AAV capsid variant further comprises an amino acid sequence encoded by the nucleotide sequence of SEQ ID NO: 137, or a sequence with at least 70% (e.g., at least 80, 85, 90, 95, 96, 97, 98, or 99%) sequence identity thereto. In some embodiments, the AAV capsid variant further comprises an amino acid sequence encoded by a nucleotide sequence comprising at least one, two or three modifications, e.g., substitutions, insertions, or deletions, but not more than 30, 20 or 10 modifications, e.g., substitutions, insertions, or deletions, relative to the nucleotide sequence of SEQ ID NO: 137. In some embodiments, the AAV capsid variant further comprises an amino acid sequence encoded by a nucleotide sequence comprising at least one, two or three, but not more than 30, 20 or 10 different nucleotides, relative to the amino acid sequence of SEQ ID NO: 137.

[0625] In some embodiments, the nucleotide sequence encoding the AAV capsid variant further comprises the nucleotide sequence of SEQ ID NO: 137, or a sequence with at least 70% (e.g., at least 80, 85, 90, 95, 96, 97, 98, or 99%) sequence identity thereto. In some embodiments, the nucleotide sequence encoding the AAV capsid variant further comprises a nucleotide sequence comprising at least one, two or three modifications, e.g., substitutions, insertions, or deletions, but not more than 30, 20 or 10 modifications, e.g., substitutions, insertions, or deletions, relative to the nucleotide sequence of SEQ ID NO: 137. In some embodiments, the nucleotide sequence encoding the AAV capsid variant further comprises a nucleotide sequence comprising at least one, two or three, but not more than 30, 20 or 10 different nucleotides, relative to the amino acid sequence of SEQ ID NO: 137.

[0626] In some embodiments, an AAV capsid variant of the present disclosure comprises an amino acid sequence as described herein, e.g., an amino acid sequence of an AAV capsid variant of TTJ-001, e.g., as described in Tables 3 and 4.

[0627] In some embodiments, an AAV capsid variant described herein comprises a VP1, VP2, and/or VP3 protein comprising an amino acid sequence described herein, e.g., an amino acid sequence of an AAV capsid variant of TTJ-001, e.g., as described in Tables 3 and 4.

[0628] In some embodiments, an AAV capsid variant described herein comprises an amino acid sequence encoded by a nucleotide sequence as described herein, e.g., a nucleotide sequence of the AAV capsid variant of TTJ-001, e.g., as described in Tables 3 and 5.

[0629] In some embodiments, a polynucleotide or nucleic acid encoding an AAV capsid variant, of the present disclosure comprises a nucleotide sequence described herein, e.g., a nucleotide sequence of the AAV capsid variant of TTJ-001, e.g., as described in Tables 3 and 5.

TABLE 3
Exemplary full length capsid sequences

| | | VP1 (amino | Peptide | |
|---|---|---|---|---|
| | VP1 DNA | acid) SEQ | (amino acid) | Peptide DNA |
| Name | SEQ ID NO: | ID NO: | SEQ ID NO: | SEQ ID NO: |
| TTJ-001 | 983 | 981 | 941 | 942 |

TABLE 4
Exemplary full length capsid
amino acid sequences

| | SEQ | |
|---|---|---|
| Name and | ID | |
| Annotation | NO: | Amino Acid Sequence |
| TTJ-001 | 981 | MAADGYLPDWLEDNLSEGIRE |
| (modifications | | WWALKPGAPQPKANQQHQDN |
| at positions | | ARGLVLPGYKYLGPGNGLDK |
| 584, 586, 587, | | GEPVNAADAAALEHDKAYDQ |
| 588, 589, and | | QLKAGDNPYLKYNHADAEFQ |
| 590, numbered | | ERLKEDTSFGGNLGRAVFQA |
| relative to SEQ | | KKRLLEPLGLVEEAAKTAPG |
| ID NO: 138 | | KKRPVEQSPQEPDSSAGIGK |
| underlined) | | SGAQPAKKRLNFGQTGDTES |
| | | VPDPQPIGEPPAAPSGVGSL |
| | | TMASGGGAPVADNNEGADGV |
| | | GSSSGNWHCDSQWLGDRVIT |
| | | TSTRTWALPTYNNHLYKQIS |
| | | NSTSGGSSNDNAYFGYSTPW |
| | | GYFDFNRFHCHFSPRDWORL |
| | | INNNWGFRPKRLNFKLFNIQ |
| | | VKEVTDNNGVKTIANNLTST |
| | | VQVFTDSDYQLPYVLGSAHE |
| | | GCLPPFPADVEMIPQYGYLT |
| | | LNDGSQAVGRSSFYCLEYFP |
| | | SQMLRTGNNFQFSYEFENVP |
| | | FHSSYAHSQSLDRLMNPLID |
| | | QYLYYLSKTINGSGQNQQTL |
| | | KFSVAGPSNMAVQGRNYIPG |
| | | PSYRQQRVSTTVTQNNNSEF |
| | | AWPGASSWALNGRNSLMNPG |
| | | PAMASHKEGEDRFFPLSGSL |
| | | IFGKQGTGRDNVDADKVMIT |
| | | NEEEIKTTNPVATESYGQVA |
| | | TNTQDWHRIAQTGWVQNQGI |
| | | LPGMVWQDRDVYLQGPIWAK |
| | | IPHTDGNFHPSPLMGGFGMK |
| | | HPPPQILIKNTPVPADPPTA |
| | | FNKDKLNSFITQYSTGQVSV |
| | | EIEWELQKENSKRWNPEIQY |
| | | TSNYYKSNNVEFAVNTEGVY |
| | | SEPRPIGTRYLTRNL |

TABLE 5
Exemplary full length capsid nucleic acid sequences

| | SEQ | |
|---|---|---|
| Name and | ID | |
| Annotation | NO: | NT Sequence |
| TTJ-001 | 983 | ATGGCTGCCGATGGTTATCTTCCAGATTGGCTCGAGGACAACCTTAGTGAAGGAAT |
| (portion of | | TCGCGAGTGGTGGGCTTTGAAACCTGGAGCCCCTCAACCCAAGGCAAATCAACAAC |
| sequence | | ATCAAGACAACGCTCGAGGTCTTGTGCTTCCGGGTTACAAATACCTTGGACCCGGC |
| encoding the | | AACGGACTCGACAAGGGGGAGCCGGTCAACGCAGCAGACGCGGCGGCCCTCGAGCA |
| amino acid | | CGACAAGGCCTACGACCAGCAGCTCAAGGCCGGAGACAACCCGTACCTCAAGTACA |
| sequence of | | ACCACGCCGACGCCGAGTTCCAGGAGCGGCTCAAAGAAGATACGTCTTTTGGGGGC |
| SEQ ID NO: | | AACCTCGGGCGAGCAGTCTTCCAGGCCAAAAAGAGGCTTCTTGAACCTCTTGGTCT |
| 744 is | | GGTTGAGGAAGCGGCTAAGACGGCTCCTGGAAAGAAGAGGCCTGTAGAGCAGTCTC |
| underlined) | | CTCAGGAACCGGACTCCTCCGCGGGTATTGGCAAATCGGGTGCACAGCCCGCTAAA |
| | | AAGAGACTCAATTTCGGTCAGACTGGCGACACAGAGTCAGTCCCAGACCCTCAACC |
| | | AATCGGAGAACCTCCCGCAGCCCCCTCAGGTGTGGGATCTCTTACAATGGCTTCAG |
| | | GTGGTGGCGCACCAGTGGCAGACAATAACGAAGGTGCCGATGGAGTGGGTAGTTCC |
| | | TCGGGAAATTGGCATTGCGATTCCCAATGGCTGGGGGACAGAGTCATCACCACCAG |
| | | CACCCGAACCTGGGCCCTGCCCACCTACAACAATCACCTCTACAAGCAAATCTCCA |
| | | ACAGCACATCTGGAGGATCTTCAAATGACAACGCCTACTTCGGCTACAGCACCCCC |
| | | TGGGGGTATTTTGACTTCAACAGATTCCACTGCCACTTCTCACCACGTGACTGGCA |
| | | GCGACTCATCAACAACAACTGGGGATTCCGGCCTAAGCGACTCAACTTCAAGCTCT |
| | | TCAACATTCAGGTCAAAGAGGTTACGGACAACAATGGAGTCAAGACCATCGCCAAT |
| | | AACCTTACCAGCACGGTCCAGGTCTTCACGGACTCAGACTATCAGCTCCCGTACGT |
| | | GCTCGGGTCGGCTCACGAGGGCTGCCTCCCGCCGTTCCCAGCGGACGTTTTCATGA |
| | | TTCCTCAGTACGGGTATCTGACGCTTAATGATGGAAGCCAGGCCGTGGGTCGTTCG |
| | | TCCTTTTACTGCCTGGAATATTTCCCGTCGCAAATGCTAAGAACGGGTAACAACTT |
| | | CCAGITCAGCTACGAGTTTGAGAACGTACCTTTCCATAGCAGCTACGCTCACAGCC |
| | | AAAGCCTGGACCGACTAATGAATCCACTCATCGACCAATACTTGTACTATCTCTCA |
| | | AAGACTATTAACGGTTCTGGACAGAATCAACAAACGCTAAAATTCAGTGTGGCCGG |
| | | ACCCAGCAACATGGCTGTCCAGGGAAGAAACTACATACCTGGACCCAGCTACCGAC |
| | | AACAACGTGTCTCAACCACTGTGACTCAAAACAACAACAGCGAATTTGCTTGGCCT |
| | | GGAGCTTCTTCTTGGGCTCTCAATGGACGTAATAGCTTGATGAATCCTGGACCTGC |
| | | TATGGCCAGCCACAAAGAAGGAGAGGACCGTTTCTTTCCTTTGTCTGGATCTTTAA |
| | | TTTTTGGCAAACAAGGAACTGGAAGAGACAACGTGGATGCGGACAAAGTCATGATA |
| | | ACCAACGAAGAAGAAATTAAAACTACTAACCCGGTAGCAACGGAGTCCTATGGACA |
| | | GGTCGCTACAAACACCCAGGACTGGCACAGGATTGCGCAGACCGGCTGGGTTCAAA |
| | | ACCAAGGAATACTTCCGGGTATGGTTTGGCAGGACAGAGATGTGTACCTGCAAGGA |
| | | CCCATTTGGGCCAAAATTCCTCACACGGACGGCAACTTTCACCCTTCTCCGCTGAT |
| | | GGGAGGGTTTGGAATGAAGCACCCGCCTCCTCAGATCCTCATCAAAAACACACCTG |
| | | TACCTGCCGATCCTCCAACGGCCTTCAACAAGGACAAGCTGAACTCTTTCATCACC |
| | | CAGTATTCTACTGGCCAAGTCAGCGTGGAGATCGAGTGGGAGCTGCAGAAGGAAAA |
| | | CAGCAAGCGGTGGAACCCGGAGATCCAGTACACTTCCAACTATTACAAGTCTAATA |
| | | ATGTTGAATTTGCTGTTAATACTGAAGGTGTATATAGTGAACCCCGCCCCATTGGC |
| | | ACCAGATACCTGACTCGTAATCTGTAA |

[0630] In some embodiments, the polynucleotide encoding an AAV capsid variant, described herein comprises the nucleotide sequence of SEQ ID NO: 983, or a nucleotide sequence with at least 70% (e.g., at least 80, 85, 90, 95, 96, 97, 98, or 99%) sequence identity thereto.

[0631] In some embodiments, the polynucleotide encoding an AAV capsid variant described herein comprises the nucleotide sequence of SEQ ID NO: 983, or a nucleotide sequence with at least 70% (e.g., at least 80, 85, 90, 95, 96, 97, 98, or 99%) sequence identity thereto. In some embodiments, the nucleotide sequence encoding an AAV capsid variant described herein, comprises a nucleotide sequence comprising at least one, two or three modifications, e.g., substitutions, insertions, or deletions, but not more than 30, 20 or 10 modifications, e.g., substitutions, insertions, or deletions, relative to the nucleotide sequence of SEQ ID NO: 983. In some embodiments, the nucleotide sequence encoding an AAV capsid variant described herein, comprises a nucleotide sequence comprising at least one, two or three, but not more than 30, 20 or 10 different nucleotides relative to the amino acid sequence of SEQ ID NO: 983. In some embodiments, the nucleic acid sequence encoding an AAV capsid variant described herein is codon optimized.

[0632] In some embodiments, an AAV capsid variant described herein, comprises the amino acid sequence of SEQ ID NO: 981, or an amino acid sequence with at least 70% (e.g., at least 80, 85, 90, 95, 96, 97, 98, or 99%) sequence identity thereto. In some embodiments, an AAV capsid variant described herein comprises an amino acid sequence comprising at least one, two, or three modifications, e.g., substitutions (e.g., conservative substitutions), insertions, or deletions, but not more than 30, 20 or 10 modifications, e.g., substitutions (e.g., conservative substitutions), insertions, or deletions, relative to the amino acid sequence of SEQ ID NO: 981. In some embodiments, an AAV capsid variant described herein comprises an amino acid sequence comprising at least one, two or three, but not more than 30, 20 or 10 different amino acids, relative to the amino acid sequence of SEQ ID NO: 981.

[0633] In some embodiments, an AAV capsid variant described herein comprises an amino acid sequence encoded by the nucleotide sequence of SEQ ID NO: 983, or a nucleotide sequence with at least 70% (e.g., at least 80, 85, 90, 95, 96, 97, 98, or 99%) sequence identity thereto. In some embodiments, an AAV capsid variant described herein comprises an amino acid sequence encoded by a nucleotide sequence comprising at least one, two or three, but not more than 30, 20 or 10 different nucleotides, relative to the amino acid sequence of SEQ ID NO: 983. In some embodiments, an AAV capsid variant described herein comprises an amino acid sequence encoded by a nucleotide sequence comprising at least one, two or three modifications, e.g., substitutions, insertions, or deletions, but not more than 30, 20 or 10 modifications, e.g., substitutions, insertions, or deletions, relative to the nucleotide sequence of SEQ ID NO: 983.

[0634] In some embodiments, an AAV capsid variant described herein comprises a VP1, VP2, VP3 protein, or a combination thereof. In some embodiments, an AAV capsid variant comprises the amino acid sequence corresponding to positions 138-736, e.g., a VP2, of SEQ ID NO: 981, or a sequence with at least 70% (e.g., at least 80, 85, 90, 95, 96, 97, 98, or 99%) sequence identity thereto. In some embodiments, the AAV capsid protein comprises the amino acid sequence corresponding to positions 203-736, e.g., a VP3, of SEQ ID NO: 981, or a sequence with at least 70% (e.g., at least 80, 85, 90, 95, 96, 97, 98, or 99%) sequence identity thereto. In some embodiments, the AAV capsid variant comprises the amino acid sequence corresponding to positions 1-736, e.g., a VP1, of SEQ ID NO: 981, or an amino acid sequence with at least 70% (e.g., at least 80, 85, 90, 95, 96, 97, 98, or 99%) sequence identity thereto.

[0635] In some embodiments, an AAV capsid variant, described herein has an increased tropism for a CNS cell or tissue, e.g., a brain cell, brain tissue, spinal cord cell, or spinal cord tissue, relative to the tropism of a reference sequence comprising the amino acid sequence of SEQ ID NO: 138.

[0636] In some embodiments, an AAV capsid variant described herein transduces a brain region, e.g., a midbrain region (e.g., the hippocampus, or thalamus) or the brain stem. In some embodiments, the level of transduction is at least 39, 50, 100, 120, 132, 146, 150, 161, 174, 175, 200, 225, 250, 275, 283, 300, 350, 400, 450, 500, 525, 528, or 550-fold greater as compared to a reference sequence of SEQ ID NO: 138.

[0637] In some embodiments, an AAV capsid variant described herein is enriched at least about 10, 14, 20, 24, 50, 100, 150, 200, 250, 300, 350, 400, 425, 450, or 460-fold in the brain compared to a reference sequence of SEQ ID NO: 138. In some embodiments, an AAV capsid variant described herein is enriched at least about 200, 250, 300, 350, 400, 425, 450, or 460-fold in the brain compared to a reference sequence of SEQ ID NO: 138.

[0638] In some embodiments, an AAV capsid variant described herein is enriched in the brain of at least two to three species, e.g., a non-human primate and rodent (e.g., mouse) species, compared to a reference sequence of SEQ ID NO: 138. In some embodiments, an AAV capsid variant described herein is enriched at least about 2, 3, 5, 10, 15, 20, 25, 30, 35, 40, 45, 50, 55, 60, 65, 70, 75, 80, 85, 90, 95, 100, 105, 115, 120, 125, 130, 135, 140, 145, 150, 155, 160, 165, 170, 175, 180, 190, 200, 205, or 210-fold in the brain of at least two to three species, e.g., a non-human primate and rodent (e.g., mouse) species, compared to a reference sequence of SEQ ID NO: 138. In some embodiments, the at least two to three species are Macaca fascicularis, Chlorocebus sabaeus, Callithrix jacchus, and/or mouse (e.g., outbred mice).

[0639] In some embodiments, an AAV capsid variant described herein is enriched at least about 2, 3, 4, 5, 10, 15, 17, 20, 50, 75, 100, 103, 107, 125, 150, 200, 250, 300, 350, 400, 450, 500, 750, 1000, 1200-fold, in the brain compared to a reference sequence of SEQ ID NO: 981.

[0640] In some embodiments, an AAV capsid variant described herein delivers an increased level of viral genomes to a brain region. In some embodiments, the level of viral genomes is increased by at least 2, 5, 7, 10, 15, 19, 20, 22, or 25-fold, as compared to a reference sequence of SEQ ID NO: 138. In some embodiments, the brain region comprises a sensory cortex, motor cortex, putamen, thalamus, caudate, hippocampus, and/or cerebellum.

[0641] In some embodiments, an AAV capsid variant described herein delivers an increased level of a payload to a brain region. In some embodiments, the level of the payload is increased by at least 39, 50, 100, 120, 132, 146, 150, 161, 174, 175, 200, 225, 250, 275, 283, 300, 350, 400, 450, 500, 525, 528, or 550-fold, as compared to a reference sequence of SEQ ID NO: 138. In some embodiments, the brain region comprises a sensory cortex, motor cortex, putamen, thalamus, caudate, hippocampus, and/or cerebellum.

[0642] In some embodiments, an AAV capsid variant described herein is enriched at least about 5, 10, 50, 100, 115, 120, 150, 175, 200, 207, 225, 250, or 275-fold, in the spinal cord compared to a reference sequence of SEQ ID NO: 138.

[0643] In some embodiments, an AAV capsid variant of the present disclosure has decreased tropism for the liver. In some embodiments, an AAV capsid variant comprises a modification, e.g., substitution (e.g., conservative substitution), insertion, or deletion, that results in reduced tropism (e.g., de-targeting) and/or activity in the liver. In some embodiments, the reduced tropism in the liver is compared to an otherwise similar capsid that does not comprise the modification, e.g., a wild-type capsid polypeptide. In some embodiments, an AAV capsid variant described comprises a modification, e.g., substitution (e.g., conservative substitution), insertion, or deletion, that results in one or more of the following properties: (1) reduced tropism in the liver; (2) de-targeted expression in the liver; (3) reduced activity in the liver; and/or (4) reduced binding to galactose. In some embodiments, the reduction in any one, or all of properties (1)-(3) is compared to an otherwise similar AAV capsid variant that does not comprise the modification. Exemplary modifications are provided in WO 2018/119330; Pulicherla et al. (2011) Mol. Ther. 19 (6): 1070-1078; Adachi et al. (2014) Nature Communications 5 (3075), DOI: 10.1038/ncomms4075; and Bell et al. (2012) J. Virol. 86 (13): 7326-33; the contents of which are hereby incorporated by reference in their entirety. In some embodiments, the AAV capsid variant comprises a modification e.g., substitution (e.g., conservative substitution), insertion, or deletion, at position N470 (e.g., N470A), D271 (e.g., D271A), N272 (e.g., N272A), Y446 (e.g., Y446A), N498 (e.g., N498Y or N4981), W503 (e.g., W503R or W503A), L620 (e.g., L620F), or a combination thereof, relative to a reference sequence numbered according to SEQ ID NO: 138. In some embodiments, the AAV capsid variant comprises one, two, three, four, five or all of an amino acid other than N at position 470 (e.g., A), an amino acid other than D at position 271 (e.g., A), an amino acid other than N at position 272 (e.g., A), an amino acid other than Y at position 446 (e.g., A), and amino acid other than N at position 498/(e.g., Y or I), and amino acid other than W at position 503 (e.g., R or A), and amino acid other than L at position 620 (e.g., F), relative to a reference sequence numbered according to SEQ ID NO: 138. In some embodiments, the AAV capsid variant comprises a modification e.g., substitution (e.g., conservative substitution), insertion, or deletion, at position N470 (e.g., N470A), D271 (e.g., D271A), N272 (e.g., N272A), Y446 (e.g., Y446A), and W503 (e.g., W503R or W503A), relative to a reference sequence numbered according to SEQ ID NO: 138. In some embodiments, the AAV capsid variant comprises a modification e.g., substitution (e.g., conservative substitution), insertion, or deletion, at N498 (e.g., N498Y) and L620 (e.g., L620F).

[0644] In some embodiments, an AAV capsid variant comprised herein comprises a modification as described in Adachi et al. (2014) Nature Communications 5 (3075), DOI: 10.1038/ncomms4075, the contents of which are hereby incorporated by reference in its entirety. Exemplary modifications that alter or do not alter tissue transduction in at least the brain, liver, heart, lung, and/or kidney can be found in Supplementary Data 2 showing the AAV Barcode-Seq data obtained with AAV9-AA-VBCLib of Adachi et al. (supra), the contents of which are hereby incorporated by reference in its entirety.

[0645] In some embodiments, an AAV capsid variant of the present disclosure is isolated, e.g., recombinant. In some embodiments, a polynucleotide encoding an AAV capsid polypeptide, e.g., an AAV capsid variant, of the present disclosure is isolated, e.g., recombinant.

[0646] Also provided herein are polynucleotide sequences encoding any of the AAV capsid variants described above and AAV particles, vectors, and cells comprising the same.

### AAV Serotypes and Capsids

[0647] In some embodiments, an AAV particle of the present disclosure may comprise a capsid protein or variant thereof any natural or recombinant AAV serotype. AAV serotypes may differ in characteristics such as, but not limited to, packaging, tropism, transduction and immunogenic profiles. While not wishing to be bound by theory, it is believed in some embodiments, that the AAV capsid protein, e.g., an AAV capsid variant, can modulate, e.g., direct, AAV particle tropism to a particular tissue.

[0648] In some embodiments, an AAV capsid variant described herein allows for blood brain barrier penetration following intravenous administration. In some embodiments, the AAV capsid variant allows for blood brain barrier penetration following intravenous administration, focused ultrasound (FUS), e.g., coupled with the intravenous administration of microbubbles (FUS-MB), or MRI-guided FUS coupled with intravenous administration. In some embodiments the AAV capsid variant allows for increased distribution to a brain region. In some embodiments, the brain region comprises a frontal cortex, sensory cortex, motor cortex, caudate, dentate nucleus, cerebellar cortex, cerebral cortex, brain stem, hippocampus, thalamus, putamen, or a combination thereof. In some embodiments, the AAV capsid variant allows for preferential transduction in a brain region relative to the transduction in the dorsal root ganglia (DRG).

[0649] In some embodiments, an AAV capsid variant allows for increased distribution to a spinal cord region. In some embodiments, the spinal region comprises a cervical spinal cord region, thoracic spinal cord region, and/or lumbar spinal cord region.

[0650] In some embodiments, the AAV capsid variant, is suitable for intramuscular administration and/or transduction of muscle fibers. In some embodiments the AAV capsid variant, allows for increased distribution to a muscle region. In some embodiments, the muscle region comprises a heart muscle, quadriceps muscle, a diaphragm muscle region, or a combination thereof. In some embodiments, the muscle region comprises a heart muscle region, e.g., a heart atrium muscle region or a heart ventricle muscle region.

[0651] In some embodiments, the initiation codon for translation of the AAV VP1 capsid protein, e.g., a capsid variant, described herein may be CTG, TTG, or GTG as described in US Patent No. U.S. Pat. No. 8,163,543, the contents of which are herein incorporated by reference in its entirety.

[0652] The present disclosure refers to structural capsid proteins (including VP1, VP2 and VP3) which are encoded by capsid (Cap) genes. These capsid proteins form an outer protein structural shell (e.g., capsid) of a viral vector such as AAV. VP capsid proteins synthesized from Cap polynucleotides generally include a methionine as the first amino acid in the peptide sequence (Met1), which is associated with the start codon (AUG or ATG) in the corresponding Cap nucleotide sequence. However, it is common for a first-methionine (Met1) residue or generally any first amino acid (AA1) to be cleaved off after or during polypeptide synthesis by protein processing enzymes such as Met-aminopeptidases. This “Met/AA-clipping” process often correlates with a corresponding acetylation of the second amino acid in the polypeptide sequence (e.g., alanine, valine, serine, threonine, etc.). Met-clipping commonly occurs with VP1 and VP3 capsid proteins but can also occur with VP2 capsid proteins.

[0653] Where the Met/AA-clipping is incomplete, a mixture of one or more (one, two or three) VP capsid proteins comprising the viral capsid may be produced, some of which may include a Met1/AA1 amino acid (Met+/AA+) and some of which may lack a Met1/AA1 amino acid as a result of Met/AA-clipping (Met−/AA−). For further discussion regarding Met/AA-clipping in capsid proteins, see Jin, et al. Direct Liquid Chromatography/Mass Spectrometry Analysis for Complete Characterization of Recombinant Adeno-Associated Virus Capsid Proteins. Hum Gene Ther Methods. 2017 Oct. 28 (5): 255-267; Hwang, et al. N-Terminal Acetylation of Cellular Proteins Creates Specific Degradation Signals. Science. 2010 Feb. 19, 327 (5968): 973-977; the contents of which are each incorporated herein by reference in its entirety.

[0654] According to the present disclosure, references to capsid proteins, e.g., AAV capsid variants, is not limited to either clipped (Met−/AA−) or unclipped (Met+/AA+) and may, in context, refer to independent capsid proteins, viral capsids comprised of a mixture of capsid proteins, and/or polynucleotide sequences (or fragments thereof) which encode, describe, produce or result in capsid proteins of the present disclosure. A direct reference to a capsid protein or capsid polypeptide (such as VP1, VP2 or VP2) may also comprise VP capsid proteins which include a Met1/AA1 amino acid (Met+/AA+) as well as corresponding VP capsid proteins which lack the Met1/AA1 amino acid as a result of Met/AA-clipping (Met−/AA−).

[0655] Further according to the present disclosure, a reference to a specific SEQ ID NO: (whether a protein or nucleic acid) which comprises or encodes, respectively, one or more capsid proteins which include a Met1/AA1 amino acid (Met+/AA+) should be understood to teach the VP capsid proteins which lack the Met1/AA1 amino acid as upon review of the sequence, it is readily apparent any sequence which merely lacks the first listed amino acid (whether or not Met1/AA1).

[0656] As a non-limiting example, reference to a VP1 polypeptide sequence which is 736 amino acids in length, and which includes a “Met1” amino acid (Met+) encoded by the AUG/ATG start codon may also be understood to teach a VP1 polypeptide sequence which is 735 amino acids in length, and which does not include the “Met1” amino acid (Met−) of the 736 amino acid Met+sequence. As a second non-limiting example, reference to a VP1 polypeptide sequence which is 736 amino acids in length, and which includes an “AA1” amino acid (AA1+) encoded by any NNN initiator codon may also be understood to teach a VP1 polypeptide sequence which is 735 amino acids in length, and which does not include the “AA1” amino acid (AA1−) of the 736 amino acid AA1+sequence.

[0657] References to viral capsids formed from VP capsid proteins (such as reference to specific AAV capsid serotypes), can incorporate VP capsid proteins which include a Met1/AA1 amino acid (Met+/AA1+), corresponding VP capsid proteins which lack the Met1/AA1 amino acid as a result of Met/AA1-clipping (Met−/AA1−), and combinations thereof (Met+/AA1+ and Met−/AA1−).

[0658] As a non-limiting example, an AAV capsid serotype can include VP1 (Met+/AA1+), VP1 (Met−/AA1−), or a combination of VP1 (Met+/AA1+) and VP1 (Met−/AA1−). An AAV capsid serotype can also include VP3 (Met+/AA1+), VP3 (Met−/AA1−), or a combination of VP3 (Met+/AA1+) and VP3 (Met−/AA1−); and can also include similar optional combinations of VP2 (Met+/AA1) and VP2 (Met−/AA1−).

### Additional AAV Sequences

[0659] In some embodiments, the AAV capsid variant, comprises at positions 582, 583, 584, 585, 586, 587, 588, 589, and/or 590, numbered relative to SEQ ID NO: 138, at least 3, 4, 5, 6, 7, 8, 9, 10, 11, 12, 13, 14, or 15 consecutive amino acids of any of amino acid sequence provided in Tables 1, 2A, 2B, 9, 14, 15, or 16.

[0660] In some embodiments, the AAV capsid variant, comprises immediately subsequent to position at positions 582, 583, 584, 585, 586, 587, 588, 589, and/or 590, numbered relative to SEQ ID NO: 138 or corresponding to equivalent positions in any other AAV serotype (e.g., AAV1, AAV2, AAV3, AAV3b, AAV4, AAV6, AAV7, AAV8, AAV9, AAVrh8, AAVrh10, AAVrh32.33, AAVrh74, PHP.N, PHP.B, or an AAV serotype as provided in Table 6 of WO 2021/230987 (the contents of which are hereby incorporated by reference in their entirety)), at least 3, 4, 5, 6, 7, 8, 9, 10, 11, 12, 13, 14, or 15 consecutive amino acids of any of amino acid sequence provided in Tables 1, 2A, 2B, 9, 14, 15, or 16. In some embodiments, the at least 3, 4, 5, 6, 7, 8, 9, 10, 11, 12, 13, 14, or 15 consecutive amino acids of any of amino acid sequence provided in Tables 1, 2A, 2B, 9, 14, 15, or 16 replaces at least one, two, three, four, five, six, seven, eight, or all of positions replaces positions 582, 583, 584, 585, 586, 587, 588, 589, and/or 590 (e.g., T582, N583, H584, Q585, S586, A587, Q588, A589, and/or Q590), numbered according to the amino acid sequence of SEQ ID NO: 138, numbered according to SEQ ID NO: 138 or corresponding to equivalent positions in any other AAV serotype (e.g., AAV1, AAV2, AAV3, AAV3b, AAV4, AAV6, AAV7, AAV8, AAV9, AAVrh8, AAVrh10, AAVrh32.33, AAVrh74, PHP.N. PHP.B, or an AAV serotype as provided in Table 6 of WO 2021/230987 (the contents of which are hereby incorporated by reference in their entirety)). In some embodiments, the AAV capsid variant comprises an amino acid other than the wild-type, e.g., native, amino acid, at one, two, three, four, five, six, seven, eight, or all of positions replaces positions 582, 583, 584, 585, 586, 587, 588, 589, and/or 590, numbered according to the amino acid sequence of SEQ ID NO: 138, numbered according to SEQ ID NO: 138 or corresponding to equivalent positions in any other AAV serotype (e.g., AAV1, AAV2, AAV3, AAV3b, AAV4, AAV6, AAV7, AAV8, AAV9, AAVrh8, AAVrh10, AAVrh32.33, AAVrh74, PHP.N. PHP.B, or an AAV serotype as provided in Table 6 of WO 2021/230987 (the contents of which are hereby incorporated by reference in their entirety)). In some embodiments, the AAV capsid variant comprises a modification, e.g., substitution, at one, two, three, four, five, six, seven, eight, or all of positions replaces positions 582, 583, 584, 585, 586, 587, 588, 589, and/or 590 (e.g., T582, N583, H584, Q585, S586, A587, Q588, A589, and/or Q590), numbered according to the amino acid sequence of SEQ ID NO: 138, numbered according to SEQ ID NO: 138 or corresponding to equivalent positions in any other AAV serotype (e.g., AAV1, AAV2, AAV3, AAV3b, AAV4, AAV6, AAV7, AAV8, AAV9, AAVrh8, AAVrh10, AAVrh32.33, AAVrh74, PHP.N. PHP.B, or an AAV serotype as provided in Table 6 of WO 2021/230987 (the contents of which are hereby incorporated by reference in their entirety).

[0661] In some embodiments, an AAV capsid polypeptide or AAV capsid variant described herein may comprise a VOY101 capsid polypeptide, an AAVPHP.B (PHP.B) capsid polypeptide, a AAVPHP.N (PHP.N) capsid polypeptide, an AAV1 capsid polypeptide, an AAV2 capsid polypeptide, an AAV5 capsid polypeptide, an AAV9 capsid polypeptide, an AAV9 K449R capsid polypeptide, an AAVrh 10 capsid polypeptide, or a functional variant thereof. In some embodiments, the AAV capsid polypeptide, e.g., AAV capsid variant, comprises an amino acid sequence of any of the AAV capsid polypeptides in Table 6, or an amino acid sequence substantially identical (e.g., having at least 70%, 75%, 80%, 85%, 90%, 92%, 95%, 97%, 98%, or 99% sequence identity) thereto. In some embodiments, the nucleotide sequence encoding the AAV capsid polypeptide comprises any one of the nucleotide sequences in Table 6, or a nucleotide sequence substantially identical (e.g., having at least 70%, 75%, 80%, 85%, 90%, 92%, 95%, 97%, 98%, or 99% sequence identity) thereto.

[0662] In some embodiments, an AAV capsid polypeptide or an AAV capsid variant described herein comprises the amino acid sequence of SEQ ID NO: 138 or an amino acid sequence substantially identical (e.g., having at least 70%, 75%, 80%, 85%, 90%, 92%, 95%, 97%, 98%, or 99% sequence identity) thereto. In some embodiments the AAV capsid polypeptide or the AAV capsid variant, comprises an amino acid sequence comprising at least one, two, or three modifications, e.g., substitutions (e.g., conservative substitutions), but no more than 30, 20, or 10 modifications, e.g., substitutions (e.g., conservative substitutions), relative to the amino acid sequence of SEQ ID NO: 138. In some embodiments, the AAV capsid polypeptide or the AAV capsid variant, comprises an amino acid sequence encoded by the nucleotide sequence of SEQ ID NO: 137 or a nucleotide sequence substantially identical (e.g., having at least 70%, 75%, 80%, 85%, 90%, 92%, 95%, 97%, 98%, or 99% sequence identity) thereto. In some embodiments, the nucleotide sequence encoding the AAV capsid polypeptide or the AAV capsid variant comprises the nucleotide sequence of SEQ ID NO: 137 or a nucleotide sequence substantially identical (e.g., having at least 70%, 75%, 80%, 85%, 90%, 92%, 95%, 97%, 98%, or 99% sequence identity) thereto. In some embodiments, the AAV capsid polypeptide or the AAV capsid variant, comprises substitution at position K449, e.g., a K449R substitution, numbered according to SEQ ID NO: 138.

[0663] In some embodiments, the AAV capsid polypeptide or the AAV capsid variant, comprises a peptide comprising the amino acid sequence of TLAVPFK (SEQ ID NO: 1262). In some embodiments, the peptide is present immediately subsequent to position 588, relative to a reference sequence numbered according to SEQ ID NO: 138. In some embodiments, the capsid polypeptide comprises the amino acid substitutions of A587D and Q588G, numbered according to SEQ ID NO: 138.

[0664] In some embodiments, the AAV capsid polypeptide or the AAV capsid variant comprises the amino acid substitution of K449R, numbered according to SEQ ID NO: 138; and a peptide comprising the amino acid sequence of TLAVPFK (SEQ ID NO: 1262), wherein the peptide is present immediately subsequent to position 588, relative to a reference sequence numbered according to SEQ ID NO: 138.

[0665] In some embodiments, the AAV capsid polypeptide or the AAV capsid variant comprises the amino acid substitution of K449R, numbered according to SEQ ID NO: 138; an peptide comprising the amino acid sequence of TLAVPFK (SEQ ID NO: 1262), wherein the insert is present immediately subsequent to position 588, relative to a reference sequence numbered according to SEQ ID NO: 138; and the amino acid substitutions of A587D and Q588G, numbered according to SEQ ID NO: 138.

[0666] In some embodiments, the AAV capsid polypeptide or the AAV capsid variant comprises a peptide comprising the amino acid sequence of TLAVPFK (SEQ ID NO: 1262), wherein the insert is present immediately subsequent to position 588, relative to a reference sequence numbered according to SEQ ID NO: 138; and the amino acid substitutions of A587D and Q588G, numbered according to SEQ ID NO: 138.

[0667] In some embodiments, the AAV capsid polypeptide or the AAV capsid variant comprises the amino acid sequence of SEQ ID NO: 11 or an amino acid sequence substantially identical (e.g., having at least 70%, 75%, 80%, 85%, 90%, 92%, 95%, 97%, 98%, or 99% sequence identity) thereto. In some embodiments the AAV capsid polypeptide or the AAV capsid variant, comprises an amino acid sequence comprising at least one, two, or three modifications, e.g., substitutions (e.g., conservative substitutions), but no more than 30, 20, or 10 modifications, e.g., substitutions (conservative substitutions), relative to the amino acid sequence of SEQ ID NO: 11, optionally wherein position 449 is not R.

[0668] In some embodiments, the AAV capsid polypeptide or AAV capsid variant, comprises the amino acid sequence of SEQ ID NO: 1 or an amino acid sequence substantially identical (e.g., having at least 70%, 75%, 80%, 85%, 90%, 92%, 95%, 97%, 98%, or 99% sequence identity) thereto. In some embodiments the AAV capsid polypeptide or the AAV capsid variant, comprises an amino acid sequence comprising at least one, two, or three modifications, e.g., substitutions (e.g., conservative substitutions), but no more than 30, 20, or 10 modifications, e.g., substitutions (e.g., conservative substitutions), relative to the amino acid sequence of SEQ ID NO: 1.

TABLE 6
AAV Sequences

| | SEQ | |
|---|---|---|
| | ID | |
| Serotype | NO: | Sequence |
| VOY101 | 1 | MAADGYLPDWLEDNLSEGIREWWALKPGAPQPKANQQHQDNARGLVLPGYKYLGPGNGLD |
| | | KGEPVNAADAAALEHDKAYDQQLKAGDNPYLKYNHADAEFQERLKEDTSFGGNLGRAVEQ |
| | | AKKRLLEPLGLVEEAAKTAPGKKRPVEQSPQEPDSSAGIGKSGAQPAKKRLNFGQTGDTE |
| | | SVPDPQPIGEPPAAPSGVGSLTMASGGGAPVADNNEGADGVGSSSGNWHCDSQWLGDRVI |
| | | TTSTRTWALPTYNNHLYKQISNSTSGGSSNDNAYFGYSTPWGYFDFNRFHCHFSPRDWQR |
| | | LINNNWGFRPKRLNFKLFNIQVKEVTDNNGVKTIANNLTSTVQVFTDSDYQLPYVLGSAH |
| | | EGCLPPFPADVFMIPQYGYLTLNDGSQAVGRSSFYCLEYFPSQMLRTGNNFQFSYEFENV |
| | | PFHSSYAHSQSLDRLMNPLIDQYLYYLSKTINGSGQNQQTLKFSVAGPSNMAVQGRNYIP |
| | | GPSYRQQRVSTTVTQNNNSEFAWPGASSWALNGRNSLMNPGPAMASHKEGEDRFFPLSGS |
| | | LIFGKQGTGRDNVDADKVMITNEEEIKTTNPVATESYGQVATNHQSDGTLAVPFKAQAQT |
| | | GWVQNQGILPGMVWQDRDVYLQGPIWAKIPHTDGNFHPSPLMGGFGMKHPPPQILIKNTP |
| | | VPADPPTAFNKDKLNSFITQYSTGQVSVEIEWELQKENSKRWNPEIQYTSNYYKSNNVEF |
| | | AVNTEGVYSEPRPIGTRYLTRNL |
| AAV9/hu. | 11 | MAADGYLPDWLEDNLSEGIREWWALKPGAPQPKANQQHQDNARGLVLPGYKYLGPGNGLD |
| 14 K449R | | KGEPVNAADAAALEHDKAYDQQLKAGDNPYLKYNHADAEFQERLKEDTSFGGNLGRAVFQ |
| | | AKKRLLEPLGLVEEAAKTAPGKKRPVEQSPQEPDSSAGIGKSGAQPAKKRLNFGQTGDTE |
| | | SVPDPQPIGEPPAAPSGVGSLTMASGGGAPVADNNEGADGVGSSSGNWHCDSQWLGDRVI |
| | | TTSTRTWALPTYNNHLYKQISNSTSGGSSNDNAYFGYSTPWGYFDFNRFHCHFSPRDWQR |
| | | LINNNWGFRPKRLNFKLFNIQVKEVTDNNGVKTIANNLTSTVQVFTDSDYQLPYVLGSAH |
| | | EGCLPPFPADVFMIPQYGYLTLNDGSQAVGRSSFYCLEYFPSQMLRTGNNFQFSYEFENV |
| | | PFHSSYAHSQSLDRLMNPLIDQYLYYLSRTINGSGQNQQTLKFSVAGPSNMAVQGRNYIP |
| | | GPSYRQQRVSTTVTQNNNSEFAWPGASSWALNGRNSLMNPGPAMASHKEGEDRFFPLSGS |
| | | LIFGKQGTGRDNVDADKVMITNEEEIKTTNPVATESYGQVATNHQSAQAQAQTGWVQNQG |
| | | ILPGMVWQDRDVYLQGPIWAKIPHTDGNFHPSPLMGGFGMKHPPPQILIKNTPVPADPPT |
| | | AFNKDKLNSFITQYSTGQVSVEIEWELQKENSKRWNPEIQYTSNYYKSNNVEFAVNTEGV |
| | | YSEPRPIGTRYLTRNL |
| AAV9/hu. | 138 | MAADGYLPDWLEDNLSEGIREWWALKPGAPQPKANQQHQDNARGLVLPGYKYLGPGNGLD |
| 14 WT | | KGEPVNAADAAALEHDKAYDQQLKAGDNPYLKYNHADAEFQERLKEDTSFGGNLGRAVEQ |
| (amino | | AKKRLLEPLGLVEEAAKTAPGKKRPVEQSPQEPDSSAGIGKSGAQPAKKRLNFGQTGDTE |
| acid) | | SVPDPQPIGEPPAAPSGVGSLTMASGGGAPVADNNEGADGVGSSSGNWHCDSQWLGDRVI |
| | | TTSTRTWALPTYNNHLYKQISNSTSGGSSNDNAYFGYSTPWGYFDFNRFHCHFSPRDWQR |
| | | LINNNWGFRPKRLNFKLFNIQVKEVTDNNGVKTIANNLTSTVQVFTDSDYQLPYVLGSAH |
| | | EGCLPPFPADVFMIPQYGYLTLNDGSQAVGRSSFYCLEYFPSQMLRTGNNFQFSYEFENV |
| | | PFHSSYAHSQSLDRLMNPLIDQYLYYLSKTINGSGQNQQTLKFSVAGPSNMAVQGRNYIP |
| | | GPSYRQQRVSTTVTQNNNSEFAWPGASSWALNGRNSLMNPGPAMASHKEGEDRFFPLSGS |
| | | LIFGKQGTGRDNVDADKVMITNEEEIKTTNPVATESYGQVATNHQSAQAQAQTGWVQNQG |
| | | ILPGMVWQDRDVYLQGPIWAKIPHTDGNFHPSPLMGGFGMKHPPPQILIKNTPVPADPPT |
| | | AFNKDKLNSFITQYSTGQVSVEIEWELQKENSKRWNPEIQYTSNYYKSNNVEFAVNTEGV |
| | | YSEPRPIGTRYLTRNL |
| AAV9/hu. | 137 | ATGGCTGCCGATGGTTATCTTCCAGATTGGCTCGAGGACAACCTTAGTGAAGGAATTCGC |
| 14 WT | | GAGTGGTGGGCTTTGAAACCTGGAGCCCCTCAACCCAAGGCAAATCAACAACATCAAGAC |
| (DNA) | | AACGCTCGAGGTCTTGTGCTTCCGGGTTACAAATACCTTGGACCCGGCAACGGACTCGAC |
| | | AAGGGGGAGCCGGTCAACGCAGCAGACGCGGCGGCCCTCGAGCACGACAAGGCCTACGAC |
| | | CAGCAGCTCAAGGCCGGAGACAACCCGTACCTCAAGTACAACCACGCCGACGCCGAGTTC |
| | | CAGGAGCGGCTCAAAGAAGATACGTCTTTTGGGGGCAACCTCGGGCGAGCAGTCTTCCAG |
| | | GCCAAAAAGAGGCTTCTTGAACCTCTTGGTCTGGTTGAGGAAGCGGCTAAGACGGCTCCT |
| | | GGAAAGAAGAGGCCTGTAGAGCAGTCTCCTCAGGAACCGGACTCCTCCGCGGGTATTGGC |
| | | AAATCGGGTGCACAGCCCGCTAAAAAGAGACTCAATTTCGGTCAGACTGGCGACACAGAG |
| | | TCAGTCCCAGACCCTCAACCAATCGGAGAACCTCCCGCAGCCCCCTCAGGTGTGGGATCT |
| | | CTTACAATGGCTTCAGGTGGTGGCGCACCAGTGGCAGACAATAACGAAGGTGCCGATGGA |
| | | GTGGGTAGTTCCTCGGGAAATTGGCATTGCGATTCCCAATGGCTGGGGGACAGAGTCATC |
| | | ACCACCAGCACCCGAACCTGGGCCCTGCCCACCTACAACAATCACCTCTACAAGCAAATC |
| | | TCCAACAGCACATCTGGAGGATCTTCAAATGACAACGCCTACTTCGGCTACAGCACCCCC |
| | | TGGGGGTATTTTGACTTCAACAGATTCCACTGCCACTTCTCACCACGTGACTGGCAGCGA |
| | | CTCATCAACAACAACTGGGGATTCCGGCCTAAGCGACTCAACTTCAAGCTCTTCAACATT |
| | | CAGGTCAAAGAGGTTACGGACAACAATGGAGTCAAGACCATCGCCAATAACCTTACCAGC |
| | | ACGGTCCAGGTCTTCACGGACTCAGACTATCAGCTCCCGTACGTGCTCGGGTCGGCTCAC |
| | | GAGGGCTGCCTCCCGCCGTTCCCAGCGGACGTTTTCATGATTCCTCAGTACGGGTATCTG |
| | | ACGCTTAATGATGGAAGCCAGGCCGTGGGTCGTTCGTCCTTTTACTGCCTGGAATATTTC |
| | | CCGTCGCAAATGCTAAGAACGGGTAACAACTTCCAGTTCAGCTACGAGTTTGAGAACGTA |
| | | CCTTTCCATAGCAGCTACGCTCACAGCCAAAGCCTGGACCGACTAATGAATCCACTCATC |
| | | GACCAATACTTGTACTATCTCTCAAAGACTATTAACGGTTCTGGACAGAATCAACAAACG |
| | | CTAAAATTCAGTGTGGCCGGACCCAGCAACATGGCTGTCCAGGGAAGAAACTACATACCT |
| | | GGACCCAGCTACCGACAACAACGTGTCTCAACCACTGTGACTCAAAACAACAACAGCGAA |
| | | TTTGCTTGGCCTGGAGCTTCTTCTTGGGCTCTCAATGGACGTAATAGCTTGATGAATCCT |
| | | GGACCTGCTATGGCCAGCCACAAAGAAGGAGAGGACCGTTTCTTTCCTTTGTCTGGATCT |
| | | TTAATTTTTGGCAAACAAGGAACTGGAAGAGACAACGTGGATGCGGACAAAGTCATGATA |
| | | ACCAACGAAGAAGAAATTAAAACTACTAACCCGGTAGCAACGGAGTCCTATGGACAAGTG |
| | | GCCACAAACCACCAGAGTGCCCAAGCACAGGCGCAGACCGGCTGGGTTCAAAACCAAGGA |
| | | ATACTTCCGGGTATGGTTTGGCAGGACAGAGATGTGTACCTGCAAGGACCCATTTGGGCC |
| | | AAAATTCCTCACACGGACGGCAACTTTCACCCTTCTCCGCTGATGGGAGGGTTTGGAATG |
| | | AAGCACCCGCCTCCTCAGATCCTCATCAAAAACACACCTGTACCTGCGGATCCTCCAACG |
| | | GCCTTCAACAAGGACAAGCTGAACTCTTTCATCACCCAGTATTCTACTGGCCAAGTCAGC |
| | | GTGGAGATCGAGTGGGAGCTGCAGAAGGAAAACAGCAAGCGCTGGAACCCGGAGATCCAG |
| | | TACACTTCCAACTATTACAAGTCTAATAATGTTGAATTTGCTGTTAATACTGAAGGTGTA |
| | | TATAGTGAACCCCGCCCCATTGGCACCAGATACCTGACTCGTAATCTGTAA |

### Viral Genome of the AAV Particle

[0669] In some embodiments, an AAV particle as described herein comprising an AAV capsid variant described herein, may be used for the delivery of a viral genome to a tissue (e.g., CNS, DRG, and/or muscle). In some embodiments, an AAV particle comprising an AAV capsid variant described herein can be used for delivery of a viral genome to a tissue or cell, e.g., CNS, DRG, or muscle cell or tissue. In some embodiments, an AAV particle of the present disclosure is a recombinant AAV particle. In some embodiments, an AAV particle of the present disclosure is an isolated AAV particle.

[0670] The viral genome may encode any payload, such as but not limited to a polypeptide (e.g., a therapeutic polypeptide), an antibody, an enzyme, an RNAi agent and/or components of a gene editing system. In one embodiment, the AAV particles described herein are used to deliver a payload to cells of the CNS, after intravenous delivery. In another embodiment, the AAV particles described herein are used to deliver a payload to cells of the DRG, after intravenous delivery. In some embodiments, the AAV particles described herein are used to deliver a payload to cells of a muscle, e.g., a heart muscle, after intravenous delivery.

[0671] In some embodiments, a viral genome of an AAV particle comprising an AAV capsid variant, as described herein, comprises a nucleotide sequence comprising a transgene encoding a payload. In some embodiments, the viral genome comprises an inverted terminal repeat sequence (ITR). In some embodiments, the viral genome comprises two ITR sequences, one at the 5′ end of the viral genome (e.g., 5′ relative to the encoded payload) and one at the 3′ end of the viral genome (e.g., 3′ relative to the encoded payload). In some embodiments, a viral genome of an AAV particle, e.g., an AAV particle comprising an AAV capsid variant described herein, may comprise a regulatory element (e.g., promoter), untranslated regions (UTR), a miR binding site, a polyadenylation sequence (polyA), a filler or stuffer sequence, an intron, and/or a linker sequence, e.g., for enhancing transgene expression.

[0672] In some embodiments, the viral genome components are selected and/or engineered for expression of the payload in a target tissue (e.g., CNS, muscle, or DRG).

### Viral Genome Component: Inverted Terminal Repeats (ITRs)

[0673] In some embodiments, the AAV particle comprising an AAV capsid variant described herein comprises a viral genome comprising an ITR and a transgene encoding a payload. In some embodiments, the viral genome comprises two ITRs. In some embodiments, the two ITRs flank the nucleotide sequence encoding the payload at the 5′ and 3′ ends. In some embodiments, the ITRs function as origins of replication comprising recognition sites for replication. In some embodiments, the ITRs comprise sequence regions which can be complementary and symmetrically arranged. In some embodiments, the ITRs incorporated into viral genomes as described herein may be comprised of naturally occurring polynucleotide sequences or recombinantly derived polynucleotide sequences.

[0674] In some embodiments, the ITR may be from the same serotype as the capsid polypeptide, e.g., capsid variant, selected from any of the known serotypes, or a variant thereof. In some embodiments, the ITR may be of a different serotype than the capsid. In some embodiments, the viral genome comprises two ITR sequence regions, wherein the ITRs are of the same serotype as one another. In some embodiments, the viral genome comprises two ITR sequence regions, wherein the ITRs are of different serotypes. Non-limiting examples include zero, one or both of the ITRs having the same serotype as the capsid. In one embodiment both ITRs of the viral genome of the AAV particle are AAV2 ITRs.

### Viral Genome Component: Promoters

[0675] In some embodiments, viral genome of an AAV particle described herein comprises at least one element to enhance the payload target specificity and expression (See e.g., Powell et al. Viral Expression Cassette Elements to Enhance Transgene Target Specificity and Expression in Gene Therapy, 2015; the contents of which are herein incorporated by reference in their entirety). Non-limiting examples of elements to enhance payload target specificity and expression include promoters, endogenous miRNAs, post-transcriptional regulatory elements (PREs), polyadenylation (PolyA) signal sequences and upstream enhancers (USEs), CMV enhancers and introns.

[0676] In some embodiments, an AAV particle comprising an AAV capsid variant described herein comprises a viral genome comprising a nucleic acid comprising a transgene encoding a payload, wherein the transgene is operably linked to a promoter. In some embodiments, the promoter is a species specific promoter, an inducible promoter, a tissue-specific promoter, or a cell cycle-specific promoter (e.g., a promoter as described in Parr et al., Nat. Med. 3:1145-9 (1997); the contents of which are herein incorporated by reference in their entirety).

[0677] In some embodiments, the Promoter may be naturally occurring or non-naturally occurring. Non-limiting examples of promoters include those derived from viruses, plants, mammals, or humans. In some embodiments, the promoters may be those derived from human cells or systems. In some embodiments, the promoter may be truncated or mutated, e.g., a promoter variant.

[0678] In some embodiments, the promoter is a ubiquitous promoter, e.g., capable of expression in multiple tissues. In some embodiments the promoter is a human elongation factor 1α-subunit (EF1α) promoter, the cytomegalovirus (CMV) immediate-early enhancer and/or promoter, the chicken β-actin (CBA) promoter and its derivative CAG, β glucuronidase (GUSB) promoter, or ubiquitin C (UBC) promoter. In some embodiments, the promoter is a cell or tissue specific promoter, e.g., capable of expression in tissues or cells of the central or peripheral nervous systems, targeted regions within (e.g., frontal cortex), and/or sub-sets of cells therein (e.g., excitatory neurons). In some embodiments, the promoter is a cell-type specific promoters capable of expression of a payload in excitatory neurons (e.g., glutamatergic), inhibitory neurons (e.g., GABA-ergic), neurons of the sympathetic or parasympathetic nervous system, sensory neurons, neurons of the dorsal root ganglia, motor neurons, or supportive cells of the nervous systems such as microglia, glial cells, astrocytes, oligodendrocytes, and/or Schwann cells.

[0679] In some embodiments, the promoter is a liver specific promoter (e.g., hAAT, TBG), skeletal muscle specific promoter (e.g., desmin, MCK, C512), B cell promoter, monocyte promoter, leukocyte promoter, macrophage promoter, pancreatic acinar cell promoter, endothelial cell promoter, lung tissue promoter, and/or cardiac or cardiovascular promoter (e.g., αMHC, cTnT, and CMV-MLC2k).

[0680] In some embodiments, the promoter is a tissue-specific promoter for payload expression in a tissue or cell of the central nervous system. In some embodiments, the promoter is a synapsin (Syn) promoter, glutamate vesicular transporter (VGLUT) promoter, vesicular GABA transporter (VGAT) promoter, parvalbumin (PV) promoter, sodium channel Nav 1.8 promoter, tyrosine hydroxylase (TH) promoter, choline acetyltransferase (ChaT) promoter, methyl-CpG binding protein 2 (MeCP2) promoter, Ca²⁺/calmodulin-dependent protein kinase II (CaMKII) promoter, metabotropic glutamate receptor 2 (mGluR2) promoter, neurofilament light (NFL) or heavy (NFH) promoter, neuron-specific enolase (NSE) promoter, β-globin minigene nβ2 promoter, preproenkephalin (PPE) promoter, enkephalin (Enk) promoter, and excitatory amino acid transporter 2 (EAAT2) promoter, or a fragment thereof. In some embodiments, the promoter is a cell-type specific promoter capable of expression in an astrocyte, e.g., a glial fibrillary acidic protein (GFAP) promoter and a EAAT2 promoter, or a fragment thereof. In some embodiments, the promoter is a cell-type specific promoter capable of expression in an oligodendrocyte, e.g., a myelin basic protein (MBP) promoter or a fragment thereof.

[0681] In some embodiments, the promoter is a GFAP promoter. In some embodiments, the promoter is a synapsin (syn or syn1) promoter, or a fragment thereof.

[0682] In some embodiments, the promoter comprises an insulin promoter or a fragment thereof.

[0683] In some embodiments, the promoter of the viral genome described herein (e.g., comprised within an AAV particle comprising an AAV capsid variant described herein) comprises an EF-1a promoter or variant thereof, e.g., as provided in Table 8. In some embodiments, the EF-1a promoter comprises the nucleotide sequence of any one of SEQ ID NOs: 987, 988, 990, 991, 995, 996, 998, 999-1007, or any one of the nucleotide sequence provided in Table 8; a nucleotide sequence comprising at least one, two, or three but no more than four modifications, e.g., substitutions, relative to the nucleotide sequence of SEQ ID NOs: 987, 988, 990, 991, 995, 996, 998, 999-1007, or any one of the nucleotide sequence provided in Table 8; or a nucleotide sequence with at least 70% (e.g., 80, 85%, 90%, 95%, 96%, 97%, 98%, or 99%) sequence identity to any one of SEQ ID NOs: 987, 988, 990, 991, 995, 996, 998, 999-1007, or any one of the nucleotide sequence provided in Table 8.

TABLE 8
Exemplary Promoter Variants

| | | SEQ ID |
|---|---|---|
| Description | Sequences | NO: |
| EF1a Promoter | CGTGAGGCTCCGGTGCCCGTCAGTGGGCAGAGCGCACATCGCCCACAGTCCCCGA | 987 |
| (intron | GAAGTTGGGGGGAGGGGTCGGCAATTGAACCGGTGCCTAGAGAAGGTGGCGCGGG | |
| underlined) | GTAAACTGGGAAAGTGATGTCGTGTACTGGCTCCGCCTTTTTCCCGAGGGTGGGG | |
| | GAGAACCGTATATAAGTGCAGTAGTCGCCGTGAACGTTCTTTTTCGCAACGGGTT | |
| | TGCCGCCAGAACACAGGTAAGTGCCGTGTGTGGTTCCCGCGGGCCTGGCCTCTTT | |
| | ACGGGTTATGGCCCTTGCGTGCCTTGAATTACTTCCACCTGGCTGCAGTACGTGA | |
| | TTCTTGATCCCGAGCTTCGGGTTGGAAGTGGGTGGGAGAGTTCGAGGCCTTGCGC | |
| | TTAAGGAGCCCCTTCGCCTCGTGCTTGAGTTGAGGCCTGGCCTGGGCGCTGGGGC | |
| | CGCCGCGTGCGAATCTGGTGGCACCTTCGCGCCTGTCTCGCTGCTTTCGATAAGT | |
| | CTCTAGCCATTTAAAATTTTTGATGACCTGCTGCGACGCTTTTTTTCTGGCAAGA | |
| | TAGTCTTGTAAATGCGGGCCAAGATCTGCACACTGGTATTTCGGTTTTTGGGGCC | |
| | GCGGGCGGCGACGGGGCCCGTGCGTCCCAGCGCACATGTTCGGCGAGGCGGGGCC | |
| | TGCGAGCGCGGCCACCGAGAATCGGACGGGGGTAGTCTCAAGCTGGCCGGCCTGC | |
| | TCTGGTGCCTGGCCTCGCGCCGCCGTGTATCGCCCCGCCCTGGGCGGCAAGGCTG | |
| | GCCCGGTCGGCACCAGTTGCGTGAGCGGAAAGATGGCCGCTTCCCGGCCCTGCTG | |
| | CAGGGAGCTCAAAATGGAGGACGCGGCGCTCGGGAGAGCGGGCGGGTGAGTCACC | |
| | CACACAAAGGAAAAGGGCCTTTCCGTCCTCAGCCGTCGCTTCATGTGACTCCACG | |
| | GAGTACCGGGCGCCGTCCAGGCACCTCGATTAGTTCTCGAGCTTTTGGAGTACGT | |
| | CGTCTTTAGGTTGGGGGGAGGGGTTTTATGCGATGGAGTTTCCCCACACTGAGTG | |
| | GGTGGAGACTGAAGTTAGGCCAGCTTGGCACTTGATGTAATTCTCCTTGGAATTT | |
| | GCCCTTTTTGAGTTTGGATCTTGGTTCATTCTCAAGCCTCAGACAGTGGTTCAAA | |
| | GTTTTTTTCTTCCATTTCAGGTGTCGTGA | |
| miniEF1a | GCCCGTCAGTGGGCAGAGCGCACATCGCCCACAGTCCCCGAGAAGTTGGGGGGAG | 988 |
| | GGGTCGGCAATTGAACCGGTGCCTAGAGAAGGTGGCGCGGGGTAAACTGGGAAAG | |
| | TGATGTCGTGTACTGGCTCCGCCTTTTTCCCGAGGGTGGGGGAGAACCGTATATA | |
| | AGTGCAGTAGTCGCCGTGAACGTTCTTTTTCGCAACGGGTTTGCCGCCAGAACAC | |
| | GCGTAAG | |
| Promoter | GCATG | |
| Variant 1 | | |
| Promoter | GGTGGAGAAGAGCATG | 990 |
| Variant 2 | | |
| Promoter | GTCATCACTGAGGTGGAGAAGAGCATG | 991 |
| Variant 3 | | |
| Promoter | CGTGAG | |
| Variant 4 | | |
| Promoter | GT | |
| Variant 5 | | |
| Promoter | GCTCCGGT | |
| Variant | | |
| 6 | | |
| Promoter | GCCCGTCAGTGGGCAGAGCGCACATCGCCCACAGTCCCCGAGAAGTTGGGGGGAG | 995 |
| Variant | GGGTCGGCAATTGAACCGGTGCCTAGAGAAGGTGGCGCGGGGTAAACTGGGAAAG | |
| 19 | TGATGTCGTGTACTGGCTCCGCCTTTTTCCCGAGGGTGGGGGAGAACCGTATATA | |
| | AGTGCAGTAGTCGCCGTGAACGTTCTTTTTCGCAACGGGTTTGCCGCCAGAACAC | |
| | AG | |
| Promoter | GCCCGTCAGTGGGCAGAGCGCACATCGCCCACAGTCCCCGAGAAGTTGGGGGGAG | 996 |
| Variant 20 | GGGTCGGCAATTGAACCGGTGCCTAGAGAAGGTGGCGCGGGGTAAACTGGGAAAG | |
| | TGATGTCGTGTACTGGCTCCGCCTTTTTCCCGAGGGTGGGGGAGAACCGTATATA | |
| | AGTGCAGTAGTCGCCGTGAACGTTCTTTTTCGCAACGGGTTTGCCGCCAGAACAC | |
| | GC | |
| Promoter | GTAAG | |
| Variant 7 | | |
| Promoter | GTGCCCGTCAGTGGGCAGAGCGCACATCGCCCACAGTCCCCGAGAAGTTGGGGGG | 998 |
| Variant 8 | AGGGGTCGGCAATTGAACCGGTGCCTAGAGAAGGTGGCGCGGGGTAAACTGGGAA | |
| | AGTGATGTCGTGTACTGGCTCCGCCTTTTTCCCGAGGGTGGGGGAGAACCGTATA | |
| | TAAGTGCAGTAGTCGCCGTGAACGTTCTTTTTCGCAACGGGTTTGCCGCCAGAAC | |
| | ACGCGTAAG | |
| Promoter | GCTCCGGTGCCCGTCAGTGGGCAGAGCGCACATCGCCCACAGTCCCCGAGAAGTT | 999 |
| Variant 9 | GGGGGGAGGGGTCGGCAATTGAACCGGTGCCTAGAGAAGGTGGCGCGGGGTAAAC | |
| | TGGGAAAGTGATGTCGTGTACTGGCTCCGCCTTTTTCCCGAGGGTGGGGGAGAAC | |
| | CGTATATAAGTGCAGTAGTCGCCGTGAACGTTCTTTTTCGCAACGGGTTTGCCGC | |
| | CAGAACACGCGTAAG | |
| Promoter | CGTGAGGCTCCGGTGCCCGTCAGTGGGCAGAGCGCACATCGCCCACAGTCCCCGA | 1000 |
| Variant 10 | GAAGTTGGGGGGAGGGGTCGGCAATTGAACCGGTGCCTAGAGAAGGTGGCGCGGG | |
| | GTAAACTGGGAAAGTGATGTCGTGTACTGGCTCCGCCTTTTTCCCGAGGGTGGGG | |
| | GAGAACCGTATATAAGTGCAGTAGTCGCCGTGAACGTTCTTTTTCGCAACGGGTT | |
| | TGCCGCCAGAACACGCGTAAG | |
| Promoter | CGTGAGGCTCCGGTGCCCGTCAGTGGGCAGAGCGCACATCGCCCACAGTCCCCGA | 1001 |
| Variant 11 | GAAGTTGGGGGGAGGGGTCGGCAATTGAACCGGTGCCTAGAGAAGGTGGCGCGGG | |
| | GTAAACTGGGAAAGTGATGTCGTGTACTGGCTCCGCCTTTTTCCCGAGGGTGGGG | |
| | GAGAACCGTATATAAGTGCAGTAGTCGCCGTGAACGTTCTTTTTCGCAACGGGTT | |
| | TGCCGCCAGAACACAG | |
| Promoter | GCATGCGTGAGGCTCCGGTGCCCGTCAGTGGGCAGAGCGCACATCGCCCACAGTC | 1002 |
| Variant 12 | CCCGAGAAGTTGGGGGGAGGGGTCGGCAATTGAACCGGTGCCTAGAGAAGGTGGC | |
| | GCGGGGTAAACTGGGAAAGTGATGTCGTGTACTGGCTCCGCCTTTTTCCCGAGGG | |
| | TGGGGGAGAACCGTATATAAGTGCAGTAGTCGCCGTGAACGTTCTTTTTCGCAAC | |
| | GGGTTTGCCGCCAGAACACGCGTAAG | |
| Promoter | GCATGCGTGAGGCTCCGGTGCCCGTCAGTGGGCAGAGCGCACATCGCCCACAGTC | 1003 |
| Variant 13 | CCCGAGAAGTTGGGGGGAGGGGTCGGCAATTGAACCGGTGCCTAGAGAAGGTGGC | |
| | GCGGGGTAAACTGGGAAAGTGATGTCGTGTACTGGCTCCGCCTTTTTCCCGAGGG | |
| | TGGGGGAGAACCGTATATAAGTGCAGTAGTCGCCGTGAACGTTCTTTTTCGCAAC | |
| | GGGTTTGCCGCCAGAACACAG | |
| Promoter | GGTGGAGAAGAGCATGCGTGAGGCTCCGGTGCCCGTCAGTGGGCAGAGCGCACAT | 1004 |
| Variant | CGCCCACAGTCCCCGAGAAGTTGGGGGGAGGGGTCGGCAATTGAACCGGTGCCTA | |
| 14 | GAGAAGGTGGCGCGGGGTAAACTGGGAAAGTGATGTCGTGTACTGGCTCCGCCTT | |
| | TTTCCCGAGGGTGGGGGAGAACCGTATATAAGTGCAGTAGTCGCCGTGAACGTTC | |
| | TTTTTCGCAACGGGTTTGCCGCCAGAACACGCGTAAG | |
| Promoter | GGTGGAGAAGAGCATGCGTGAGGCTCCGGTGCCCGTCAGTGGGCAGAGCGCACAT | 1005 |
| Variant 15 | CGCCCACAGTCCCCGAGAAGTTGGGGGGAGGGGTCGGCAATTGAACCGGTGCCTA | |
| | GAGAAGGTGGCGCGGGGTAAACTGGGAAAGTGATGTCGTGTACTGGCTCCGCCTT | |
| | TTTCCCGAGGGTGGGGGAGAACCGTATATAAGTGCAGTAGTCGCCGTGAACGTTC | |
| | TTTTTCGCAACGGGTTTGCCGCCAGAACACAG | |
| Promoter | GTCATCACTGAGGTGGAGAAGAGCATGCGTGAGGCTCCGGTGCCCGTCAGTGGGC | 1006 |
| Variant | AGAGCGCACATCGCCCACAGTCCCCGAGAAGTTGGGGGGAGGGGTCGGCAATTGA | |
| 16 | ACCGGTGCCTAGAGAAGGTGGCGCGGGGTAAACTGGGAAAGTGATGTCGTGTACT | |
| | GGCTCCGCCTTTTTCCCGAGGGTGGGGGAGAACCGTATATAAGTGCAGTAGTCGC | |
| | CGTGAACGTTCTTTTTCGCAACGGGTTTGCCGCCAGAACACGCGTAAG | |
| Promoter | GTCATCACTGAGGTGGAGAAGAGCATGCGTGAGGCTCCGGTGCCCGTCAGTGGGC | 1007 |
| Variant 18 | AGAGCGCACATCGCCCACAGTCCCCGAGAAGTTGGGGGGAGGGGTCGGCAATTGA | |
| | ACCGGTGCCTAGAGAAGGTGGCGCGGGGTAAACTGGGAAAGTGATGTCGTGTACT | |
| | GGCTCCGCCTTTTTCCCGAGGGTGGGGGAGAACCGTATATAAGTGCAGTAGTCGC | |
| | CGTGAACGTTCTTTTTCGCAACGGGTTTGCCGCCAGAACACAG | |

### Viral Genome Component: Untranslated Regions (UTRs)

[0684] In some embodiments, wild type untranslated regions (UTRs) of a gene are transcribed but not translated. Generally, the 5′ UTR starts at the transcription start site and ends at the start codon and the 3′ UTR starts immediately following the stop codon and continues until the termination signal for transcription.

[0685] Features typically found in abundantly expressed genes of specific target organs (e.g., CNS tissue, muscle, or DRG) may be engineered into UTRs to enhance stability and protein production. As a non-limiting example, a 5′ UTR from mRNA normally expressed in the brain (e.g., huntingtin) may be used in the viral genomes of the AAV particles described herein to enhance expression in neuronal cells or other cells of the central nervous system.

[0686] While not wishing to be bound by theory, wild-type 5′ untranslated regions (UTRs) include features which play roles in translation initiation. Kozak sequences, which are commonly known to be involved in the process by which the ribosome initiates translation of many genes, are usually included in 5′ UTRs. Kozak sequences have the consensus CCR (A/G) CCAUGG, where R is a purine (adenine or guanine) three bases upstream of the start codon (ATG), which is followed by another ‘G’.

[0687] In one embodiment, the 5′UTR in the viral genome includes a Kozak sequence.

[0688] In one embodiment, the 5′UTR in the viral genome does not include a Kozak sequence.

[0689] While not wishing to be bound by theory, wild-type 3′ UTRs are known to have stretches of Adenosines and Uridines embedded therein. These AU rich signatures are particularly prevalent in genes with high rates of turnover. Based on their sequence features and functional properties, the AU rich elements (AREs) can be separated into three classes (Chen et al, 1995, the contents of which are herein incorporated by reference in its entirety): Class I AREs, such as, but not limited to, c-Myc and MyoD, contain several dispersed copies of an AUUUA motif within U-rich regions. Class II AREs, such as, but not limited to, GM-CSF and TNF-α, possess two or more overlapping UUAUUUA (U/A) (U/A) nonamers. Class III ARES, such as, but not limited to, c-Jun and Myogenin, are less well defined. These U rich regions do not contain an AUUUA motif. Most proteins binding to the AREs are known to destabilize the messenger, whereas members of the ELAV family, most notably HuR, have been documented to increase the stability of mRNA. HuR binds to AREs of all the three classes. Engineering the HuR specific binding sites into the 3′ UTR of nucleic acid molecules will lead to HuR binding and thus, stabilization of the message in vivo.

[0690] Introduction, removal or modification of 3′ UTR AU rich elements (AREs) can be used to modulate the stability of a polynucleotide. When engineering specific polynucleotides, e.g., payload regions of viral genomes, one or more copies of an ARE can be introduced to make polynucleotides less stable and thereby curtail translation and decrease production of the resultant protein. Likewise, AREs can be identified and removed or mutated to increase the intracellular stability and thus increase translation and production of the resultant protein.

[0691] In one embodiment, the 3′ UTR of the viral genome may include an oligo (dT) sequence for templated addition of a poly-A tail.

[0692] In one embodiment, the viral genome may include at least one miRNA seed, binding site or full sequence. microRNAs (or miRNA or miR) are 19-25 nucleotide noncoding RNAs that bind to the sites of nucleic acid targets and down-regulate gene expression either by reducing nucleic acid molecule stability or by inhibiting translation. In some embodiments, a microRNA sequence comprises a seed region, e.g., a sequence in the region of positions 2-8 of the mature microRNA, which has Watson-Crick sequence fully or partially complementarity to the miRNA target sequence of the nucleic acid.

[0693] In one embodiment, the viral genome may be engineered to include, alter or remove at least one miRNA binding site, full sequence or seed region.

[0694] Any UTR from any gene known in the art may be incorporated into the viral genome of the AAV particle. These UTRs, or portions thereof, may be placed in the same orientation as in the gene from which they were selected or they may be altered in orientation or location. In one embodiment, the UTR used in the viral genome of the AAV particle may be inverted, shortened, lengthened, made with one or more other 5′ UTRs or 3′ UTRs known in the art. As used herein, the term “altered” as it relates to a UTR, means that the UTR has been changed in some way in relation to a reference sequence. For example, a 3′ or 5′ UTR may be altered relative to a wild type or native UTR by the change in orientation or location as taught above or may be altered by the inclusion of additional nucleotides, deletion of nucleotides, swapping or transposition of nucleotides.

[0695] In one embodiment, the viral genome of the AAV particle comprises at least one artificial UTR which is not a variant of a wild type UTR.

[0696] In one embodiment, the viral genome of the AAV particle comprises UTRs which have been selected from a family of transcripts whose proteins share a common function, structure, feature or property.

### Viral Genome Component: Polyadenylation Sequence

[0697] The viral genome of the AAV particle described herein (e.g., an AAV particle comprising an AAV capsid variant, described herein) may comprise a polyadenylation sequence. In some embodiments, the viral genome of the AAV particle (e.g., an AAV particle comprising an AAV capsid variant, described herein) comprises a polyadenylation sequence between the 3′ end of the nucleotide sequence encoding the payload and the 5′ end of the 3′ITR.

### Viral Genome Component: Introns

[0698] In some embodiments, the viral genome of the AAV particle as described herein (e.g., an AAV particle comprising an AAV capsid variant), comprises an element to enhance the payload target specificity and expression (See e.g., Powell et al. Viral Expression Cassette Elements to Enhance Transgene Target Specificity and Expression in Gene Therapy, Discov. Med, 2015, 19 (102): 49-57; the contents of which are herein incorporated by reference in their entirety), such as an intron. Non-limiting examples of introns include, MVM (67-97 bps), F.IX truncated intron 1 (300 bps), β-globin SD/immunoglobulin heavy chain splice acceptor (250 bps), adenovirus splice donor/immunoglobin splice acceptor (500 bps), SV40 late splice donor/splice acceptor (19S/16S) (180 bps) and hybrid adenovirus splice donor/IgG splice acceptor (230 bps).

### Viral Genome Component: Stuffer Sequences

[0699] In some embodiments, the viral genome of an AAV particle described herein (e.g., an AAV particle comprising an AAV capsid polypeptide, e.g., an AAV capsid variant), comprises an element to improve packaging efficiency and expression, such as a stuffer or filler sequence. Non-limiting examples of stuffer sequences include albumin and/or alpha-1 antitrypsin. Any known viral, mammalian, or plant sequence may be manipulated for use as a stuffer sequence.

### Viral Genome Component: MiRNA

[0700] In one embodiment, the viral genome comprises a sequence encoding a miRNA to reduce the expression of the payload in a tissue or cell, e.g., the DRG (dorsal root ganglion), or neurons of other ganglia, such as those of the sympathetic or parasympathetic nervous system. In some embodiments, a miRNA, e.g., a miR183, a miR 182, and/or miR96, may be encoded in the viral genome to modulate, e.g., reduce the expression, of the viral genome in a DRG neuron. As another non-limiting example, a miR122 miRNA may be encoded in the viral genome to modulate, e.g., reduce, the expression of the viral genome in the liver. In some embodiments, a miRNA, e.g., a miR142-3p, may be encoded in the viral genome to modulate, e.g., reduce, the expression, of the viral genome in a cell or tissue of the hematopoietic lineage, including for example immune cells (e.g., antigen presenting cells or APC, including dendritic cells (DCs), macrophages, and B-lymphocytes). In some embodiments, a miRNA, e.g., a miR1, may be encoded in the viral genome to modulate, e.g., reduce, the expression, of the viral genome in a cell or tissue of the heart.

### Viral Genome Component: MiR Binding Site

[0701] Tissue- or cell-specific expression of the AAV viral particles disclosed herein can be enhanced by introducing tissue- or cell-specific regulatory sequences, e.g., promoters, enhancers, microRNA binding sites, e.g., a detargeting site. Without wishing to be bound by theory, it is believed that an encoded miR binding site can modulate, e.g., prevent, suppress, or otherwise inhibit, the expression of a gene of interest on the viral genome disclosed herein, based on the expression of the corresponding endogenous microRNA (miRNA) or a corresponding controlled exogenous miRNA in a tissue or cell, e.g., a non-targeting cell or tissue. In some embodiments, a miR binding site modulates, e.g., reduces, expression of the payload encoded by a viral genome of an AAV particle described herein in a cell or tissue where the corresponding mRNA is expressed.

[0702] In some embodiments, the viral genome of an AAV particle described herein comprises a nucleotide sequence encoding a microRNA binding site, e.g., a detargeting site. In some embodiments, the viral genome of an AAV particle described herein comprises a nucleotide sequence encoding a miR binding site, a microRNA binding site series (miR BSs), or a reverse complement thereof.

[0703] In some embodiments, the nucleotide sequence encoding the miR binding site series or the miR binding site is located in the 3′-UTR region of the viral genome (e.g., 3′ relative to the nucleotide sequence encoding a payload), e.g., before the polyA sequence, 5′-UTR region of the viral genome (e.g., 5′ relative to the nucleotide sequence encoding a payload), or both.

[0704] In some embodiments, the encoded miR binding site series comprise at least 1-5 copies, e.g., at least 1-3, 2-4, 3-5, 1, 2, 3, 4, 5 or more copies of a miR binding site (miR BS). In some embodiments, all copies are identical, e.g., comprise the same miR binding site. In some embodiments, the miR binding sites within the encoded miR binding site series are continuous and not separated by a spacer. In some embodiments, the miR binding sites within an encoded miR binding site series are separated by a spacer, e.g., a non-coding sequence. In some embodiments, the spacer is about 1 to 6 nucleotides or about 5 to 10 nucleotides, e.g., about 7-8 nucleotides, nucleotides in length. In some embodiments, the spacer coding sequence or reverse complement thereof comprises one or more of (i) GGAT; (ii) CACGTG; (iii) GCATGC, or a repeat of one or more of (i)-(iii). In some embodiments, the spacer comprises the nucleotide sequence of GATAGTTA, or a nucleotide sequence having at least one, two, or three modifications, e.g., substitutions (e.g., conservative substitutions), insertions, or deletions, but no more than four modifications, e.g., substitutions (e.g., conservative substitutions), insertions, or deletions relative to the nucleotide sequence of GATAGTTA.

[0705] In some embodiments, the encoded miR binding site series comprise at least 1-5 copies, e.g., at least 1-3, 2-4, 3-5, 1, 2, 3, 4, 5 or more copies of a miR binding site (miR BS). In some embodiments, at least 1, 2, 3, 4, 5, or all of the copies are different, e.g., comprise a different miR binding site. In some embodiments, the miR binding sites within the encoded miR binding site series are continuous and not separated by a spacer. In some embodiments, the miR binding sites within an encoded miR binding site series are separated by a spacer, e.g., a non-coding sequence. In some embodiments, the spacer is about 1 to 6 nucleotides or about 5 to 10 nucleotides, e.g., about 7-8 nucleotides, in length. In some embodiments, the spacer comprises one or more of (i) GGAT; (ii) CACGTG; (iii) GCATGC, or a repeat of one or more of (i)-(iii). In some embodiments, the spacer comprises the nucleotide sequence of GATAGTTA, or a nucleotide sequence having at least one, two, or three modifications, e.g., substitutions (e.g., conservative substitutions), insertions, but no more than four modifications, e.g., substitutions (e.g., conservative substitutions), insertions, or deletions relative to the nucleotide sequence of GATAGTTA.

[0706] In some embodiments, the encoded miR binding site is substantially identical (e.g., at least 70%, 75%, 80%, 85%, 90%, 95%, 99% or 100% identical), to the miR in the host cell. In some embodiments, the encoded miR binding site comprises at least 1, 2, 3, 4, or 5 mismatches or no more than 6, 7, 8, 9, or 10 mismatches to a miR in the host cell. In some embodiments, the mismatched nucleotides are contiguous. In some embodiments, the mismatched nucleotides are non-contiguous. In some embodiments, the mismatched nucleotides occur outside the seed region-binding sequence of the miR binding site, such as at one or both ends of the miR binding site. In some embodiments, the miR binding site is 100% identical to the miR in the host cell.

[0707] In some embodiments, the nucleotide sequence encoding the miR binding site is substantially complementary (e.g., at least 70%, 75%, 80%, 85%, 90%, 95%, 99% or 100% complementary), to the miR in the host cell. In some embodiments, to complementary sequence of the nucleotide sequence encoding the miR binding site comprises at least 1, 2, 3, 4, or 5 mismatches or no more than 6, 7, 8, 9, or 10 mismatches to a miR in the host cell. In some embodiments, the mismatched nucleotides are contiguous. In some embodiments, the mismatched nucleotides are non-contiguous. In some embodiments, the mismatched nucleotides occur outside the seed region-binding sequence of the miR binding site, such as at one or both ends of the miR binding site. In some embodiments, the encoded miR binding site is 100% complementary to the miR in the host cell.

[0708] In some embodiments, an encoded miR binding site or sequence region is at least 10 to about 125 nucleotides in length, e.g., at least 10 to 50 nucleotides, 10 to 100 nucleotides, 50 to 100 nucleotides, 50 to 125 nucleotides, or 100 to 125 nucleotides in length. In some embodiments, an encoded miR binding site or sequence region is at least 7 to 28 nucleotides in length, e.g., at least 8-28 nucleotides, 7-28 nucleotides, 8-18 nucleotides, 12-28 nucleotides, 20-26 nucleotides, 22 nucleotides, 24 nucleotides, or 26 nucleotides in length, and optionally comprises at least one consecutive region (e.g., 7 or 8 nucleotides) complementary (e.g., fully or partially complementary) to the seed sequence of a miRNA (e.g., a miR 122, a miR142, a miR 183, or a miR1).

[0709] In some embodiments, the encoded miR binding site is complementary (e.g., fully or partially complementary) to a miR expressed in liver or hepatocytes, such as miR 122. In some embodiments, the encoded miR binding site or encoded miR binding site series comprises a miR122 binding site sequence. In some embodiments, the encoded miR122 binding site comprises the nucleotide sequence of ACAAACACCATTGTCACACTCCA (SEQ ID NO: 4673), or a nucleotide sequence having at least 50%, 55%, 60%, 65%, 70%, 75%, 80%, 85%, 90%, at least 95%, at least 99%, or 100% sequence identity, or having at least one, two, three, four, five, six, or seven modifications, e.g., substitutions, insertions, or deletions, but no more than ten modifications, e.g., insertions, deletions, or substitutions, relative to the nucleotide sequence of SEQ ID NO: 4673, e.g., wherein the modification can result in a mismatch between the encoded miR binding site and the corresponding miRNA. In some embodiments, the viral genome comprises at least 2, 3, 4, or 5 copies of the encoded miR122 binding site, e.g., an encoded miR 122 binding site series, optionally wherein the encoded miR122 binding site series comprises the nucleotide sequence of: ACAAACACCATTGTCACACTCCACACAAACACCATTGTCACACTCCACACAAACACCATTGTCACACT CCA (SEQ ID NO: 4674), or a nucleotide sequence having at least 50%, 55%, 60%, 65%, 70%, 75%, 80%, 85%, 90%, at least 95%, at least 99%, or 100% sequence identity, or having at least one, two, three, four, five, six, or seven modifications, e.g., substitutions, insertions, or deletions, but no more than ten modifications, e.g., substitutions (e.g., conservative substitutions), insertions, or deletions, relative to the nucleotide sequence of SEQ ID NO: 4674, e.g., wherein the modification can result in a mismatch between the encoded miR binding site and the corresponding miRNA. In some embodiments, at least two of the encoded miR122 binding sites are connected directly, e.g., without a spacer. In other embodiments, at least two of the encoded miR122 binding sites are separated by a spacer, e.g., 1, 2, 3, 4, 5, 6, 7, 8, 9, or 10 nucleotides in length, which is located between two or more consecutive encoded miR 122 binding site sequences. In embodiments, the spacer is about 1 to 6 nucleotides or about 5 to 10 nucleotides, e.g., about 7-8, in length. In some embodiments, the spacer coding sequence or reverse complement thereof comprises one or more of (i) GGAT; (ii) CACGTG; (iii) GCATGC, or a repeat of one or more of (i)-(iii). In some embodiments, an encoded miR binding site series comprises at least 3-5 copies (e.g., 4 copies) of a miR122 binding site, with or without a spacer, wherein the spacer is about 1 to 6 nucleotides or about 5 to 10 nucleotides, e.g., about 7-8 nucleotides or about 8 nucleotides, in length. In some embodiments, the spacer comprises the nucleotide sequence of GATAGTTA, or a nucleotide sequence having at least one, two, or three modifications, e.g., substitutions (e.g., conservative substitutions), insertions, or deletions, but no more than four modifications, e.g., substitutions (e.g., conservative substitutions), insertions, or deletions relative to the nucleotide sequence of GATAGTTA.

[0710] In some embodiments, the encoded miR binding site is complementary (e.g., fully or partially complementary) to a miR expressed in the heart. In embodiments, the encoded miR binding site or encoded miR binding site series comprises a miR 1 binding site. In some embodiments, the encoded miR1 binding site comprises the nucleotide sequence of ATACATACTTCTTTACATTCCA (SEQ ID NO: 4679), a nucleotide sequence having at least 50%, 55%, 60%, 65%, 70%, 75%, 80%, 85%, 90%, at least 95%, at least 99%, or 100% sequence identity, or having at least one, two, three, four, five, six, or seven modifications, e.g., substitutions, insertions, or deletions, but no more than ten modifications, e.g., substitutions, insertions, or deletions, relative to the nucleotide sequence of SEQ ID NO: 4679, e.g., wherein the modification can result in a mismatch between the encoded miR binding site and the corresponding miRNA. In some embodiments, the viral genome comprises at least 2, 3, 4, or 5 copies of the encoded miR1 binding site, e.g., an encoded miR1 binding site series. In some embodiments, the at least 2, 3, 4, or 5 copies (e.g., 2 or 3 copies) of the encoded miR 1 binding site are continuous (e.g., not separated by a spacer) or separated by a spacer. In some embodiments, the spacer is about 1 to 6 nucleotides or about 5 to 10 nucleotides, e.g., about 7-8 nucleotides or about 8 nucleotides, in length. In some embodiments, the spacer sequence comprises one or more of (i) GGAT; (ii) CACGTG; (iii) GCATGC, or a repeat of one or more of (i)-(iii). In some embodiments, the spacer comprises the nucleotide sequence of GATAGTTA, or a nucleotide sequence having at least one, two, or three modifications, e.g., substitutions, insertions, or deletions, but no more than four modifications, e.g., substitutions, insertions, or deletions, relative to the nucleotide sequence of GATAGTTA.

[0711] In some embodiments, the encoded miR binding site is complementary (e.g., fully or partially complementary) to a miR expressed in hematopoietic lineage, including immune cells (e.g., antigen presenting cells or APC, including dendritic cells (DCs), macrophages, and B-lymphocytes). In some embodiments, the encoded miR binding site complementary to a miR expressed in hematopoietic lineage comprises a nucleotide sequence disclosed, e.g., in US 2018/0066279, the contents of which are incorporated by reference herein in its entirety.

[0712] In embodiments, the encoded miR binding site or encoded miR binding site series comprises a miR 142-3p binding site sequence. In some embodiments, the encoded miR142-3p binding site comprises the nucleotide sequence of TCCATAAAGTAGGAAACACTACA (SEQ ID NO: 4675), a nucleotide sequence having at least 50%, 55%, 60%, 65%, 70%, 75%, 80%, 85%, 90%, at least 95%, at least 99%, or 100% sequence identity, or having at least one, two, three, four, five, six, or seven modifications, e.g., substitutions, insertions, or deletions, but no more than ten modifications, e.g., substitutions, insertions, or deletions, relative to the nucleotide sequence of SEQ ID NO: 4675, e.g., wherein the modification can result in a mismatch between the encoded miR binding site and the corresponding miRNA. In some embodiments, the viral genome comprises at least 2, 3, 4, or 5 copies of the encoded miR142-3p binding site, e.g., an encoded miR 142-3p binding site series. In some embodiments, the at least 2, 3, 4, or 5 copies (e.g., 2 or 3 copies) of the encoded miR 142-3p binding site are continuous (e.g., not separated by a spacer) or separated by a spacer. In some embodiments, the spacer is about 1 to 6 nucleotides or about 5 to 10 nucleotides, e.g., about 7-8 nucleotides or about 8 nucleotides, in length. In some embodiments, the spacer sequence comprises one or more of (i) GGAT; (ii) CACGTG; (iii) GCATGC, or a repeat of one or more of (i)-(iii). In some embodiments, the spacer comprises the nucleotide sequence of GATAGTTA, or a nucleotide sequence having at least one, two, or three modifications, e.g., substitutions, insertions, or deletions, but no more than four modifications, e.g., substitutions, insertions, or deletions, relative to the nucleotide sequence of GATAGTTA.

[0713] In some embodiments, the encoded miR binding site is complementary (e.g., fully complementary or partially complementary) to a miR expressed in a DRG (dorsal root ganglion) neuron, e.g., a miR 183, a miR182, and/or miR96 binding site. In some embodiments, the encoded miR binding site is complementary to a miR expressed in expressed in a DRG neuron comprises a nucleotide sequence disclosed, e.g., in WO2020/132455, the contents of which are incorporated by reference herein in its entirety.

[0714] In some embodiments, the encoded miR binding site or encoded miR binding site series comprises a miR183 binding site sequence. In some embodiments, the encoded miR183 binding site comprises the nucleotide sequence of AGTGAATTCTACCAGTGCCATA (SEQ ID NO: 4676), or a nucleotide sequence having at least 50%, 55%, 60%, 65%, 70%, 75%, 80%, 85%, 90%, at least 95%, at least 99%, or 100% sequence identity, or having at least one, two, three, four, five, six, or seven modifications, e.g., substitutions, insertions, or deletions, but no more than ten modifications, e.g., substitutions, insertions, or deletions, relative to the nucleotide sequence of SEQ ID NO: 4676, e.g., wherein the modification can result in a mismatch between the encoded miR binding site and the corresponding miRNA. In some embodiments, the sequence complementary to the seed sequence corresponds to the double underlined of the encoded miR183 binding site sequence. In some embodiments, the viral genome comprises at least comprises at least 2, 3, 4, or 5 copies (e.g., at least 2 or 3 copies) of the encoded miR 183 binding site, e.g., an encoded miR 183 binding site. In some embodiments, the at least 2, 3, 4, or 5 copies (e.g., 2 or 3 copies) of the encoded miR183 binding site are continuous (e.g., not separated by a spacer) or separated by a spacer. In some embodiments, the spacer is about 1 to 6 nucleotides or about 5 to 10 nucleotides, e.g., about 7-8 nucleotides or about 8 nucleotides, in length. In some embodiments, the spacer comprises the nucleotide sequence of GATAGTTA, or a nucleotide sequence having at least one, two, or three modifications, e.g., substitutions, insertions, or deletions, but no more than four modifications, e.g., substitutions, insertions, or deletions, relative to the nucleotide sequence of GATAGTTA. In some embodiments, the spacer sequence comprises one or more of (i) GGAT; (ii) CACGTG; (iii) GCATGC, or a repeat of one or more of (i)-(iii).

[0715] In some embodiments, the encoded miR binding site or the encoded miR binding site series comprises a miR 182 binding site sequence. In some embodiments, the encoded miR182 binding site comprises, the nucleotide sequence of AGTGTGAGTTCTACCATTGCCAAA (SEQ ID NO: 4677), a sequence having at least 50%, 55%, 60%, 65%, 70%, 75%, 80%, 85%, 90%, at least 95%, at least 99%, or 100% sequence identity, or having at least one, two, three, four, five, six, or seven modifications, e.g., substitutions, insertions, or deletions, but no more than ten modifications, e.g., substitutions, insertions, or deletions, relative to the nucleotide sequence of SEQ ID NO: 4677, e.g., wherein the modification can result in a mismatch between the encoded miR binding site and the corresponding miRNA. In some embodiments, the viral genome comprises at least 2, 3, 4, or 5 copies of the encoded miR182 binding site, e.g., an encoded miR 182 binding site series. In some embodiments, the at least 2, 3, 4, or 5 copies (e.g., 2 or 3 copies) of the encoded miR 182 binding site are continuous (e.g., not separated by a spacer) or separated by a spacer. In some embodiments, the spacer is about 1 to 6 nucleotides or about 5 to 10 nucleotides, e.g., about 7-8 nucleotides or about 8 nucleotides, in length. In some embodiments, the spacer comprises the nucleotide sequence of GATAGTTA, or a nucleotide sequence having at least one, two, or three modifications, e.g., substitutions, insertions, or deletions, but no more than four modifications, e.g., substitutions, insertions, or deletions, relative to the nucleotide sequence of GATAGTTA. In some embodiments, the spacer sequence comprises one or more of (i) GGAT; (ii) CACGTG; (iii) GCATGC, or a repeat of one or more of (i)-(iii).

[0716] In certain embodiments, the encoded miR binding site or the encoded miR binding site series comprises a miR96 binding site sequence. In some embodiments, the encoded miR96 binding site comprises the nucleotide sequence of AGCAAAAATGTGCTAGTGCCAAA (SEQ ID NO: 4678), a sequence having at least 50%, 55%, 60%, 65%, 70%, 75%, 80%, 85%, 90%, at least 95%, at least 99%, or 100% sequence identity, or having at least one, two, three, four, five, six, or seven modifications, e.g., substitutions, insertions, or deletions, but no more than ten modifications, e.g., substitutions, insertions, or deletions, relative to the nucleotide sequence of SEQ ID NO: 4678, e.g., wherein the modification can result in a mismatch between the encoded miR binding site and the corresponding miRNA. In some embodiments, the viral genome comprises at least 2, 3, 4, or 5 copies of the encoded miR96 binding site, e.g., an encoded miR96 binding site series. In some embodiments, the at least 2, 3, 4, or 5 copies (e.g., 2 or 3 copies) of the encoded miR96 binding site are continuous (e.g., not separated by a spacer) or separated by a spacer. In some embodiments, the spacer is about 1 to 6 nucleotides or about 5 to 10 nucleotides, e.g., about 7-8 nucleotides or about 8 nucleotides, in length. In some embodiments, the spacer comprises the nucleotide sequence of GATAGTTA, or a nucleotide sequence having at least one, two, or three modifications, e.g., substitutions, insertions, or deletions, but no more than four modifications, e.g., substitutions, insertions, or deletions, relative to the nucleotide sequence of GATAGTTA. In some embodiments, the spacer sequence comprises one or more of (i) GGAT; (ii) CACGTG; (iii) GCATGC, or a repeat of one or more of (i)-(iii).

[0717] In some embodiments, the encoded miR binding site series comprises a miR 122 binding site, a miR1, a miR 142 binding site, a miR 183 binding site, a miR182 binding site, a miR 96 binding site, or a combination thereof. In some embodiments, the encoded miR binding site series comprises at least 2, 3, 4, or 5 copies of a miR122 binding site, a miR 142 binding site, a miR183 binding site, a miR182 binding site, a miR 96 binding site, or a combination thereof. In some embodiments, at least two of the encoded miR binding sites are connected directly, e.g., without a spacer. In other embodiments, at least two of the encoded miR binding sites are separated by a spacer, e.g., 1, 2, 3, 4, 5, 6, 7, 8, 9, or 10 nucleotides in length, which is located between two or more consecutive encoded miR binding site sequences. In embodiments, the spacer is at least about 5 to 10 nucleotides, e.g., about 7-8 nucleotides or about 8 nucleotides, in length. In some embodiments, the spacer coding sequence or reverse complement thereof comprises one or more of (i) GGAT; (ii) CACGTG; (iii) GCATGC, or a repeat of one or more of (i)-(iii). In some embodiments, the spacer comprises the nucleotide sequence of GATAGTTA, or a nucleotide sequence having at least one, two, or three modifications, e.g., substitutions (e.g., conservative substitutions), insertions, or deletions, but no more than four modifications, e.g., substitutions (e.g., conservative substitutions), insertions, or deletions, relative to the nucleotide sequence of GATAGTTA.

[0718] In some embodiments, an encoded miR binding site series comprises at least 2-5 copies (e.g., 2 or 3 copies) of a combination of at least two, three, four, five, or all of a miR1, miR 122 binding site, a miR 142 binding site, a miR 183 binding site, a miR 182 binding site, a miR96 binding site, wherein each of the miR binding sites within the series are continuous (e.g., not separated by a spacer) or are separated by a spacer. In some embodiments, the spacer is about 1 to 6 nucleotides or about 5 to 10 nucleotides, e.g., about 7-8 nucleotides or about 8 nucleotides, in length. In some embodiments, the spacer sequence comprises one or more of (i) GGAT; (ii) CACGTG; (iii) GCATGC, or a repeat of one or more of (i)-(iii). In some embodiments, the spacer comprises the nucleotide sequence of GATAGTTA, or a nucleotide sequence having at least one, two, or three modifications, e.g., substitutions, insertions, or deletions, but no more than four modifications, e.g., substitutions, insertions, or deletions, relative to the nucleotide sequence of GATAGTTA.

[0719] In some embodiments, an encoded miR binding site series comprises at least 2-5 copies (e.g., 2 or 3 copies) of a combination of a miR122 binding site and a miR1 binding site, wherein each of the miR binding sites within the series are continuous (e.g., not separated by a spacer) or are separated by a spacer. In some embodiments, the spacer is about 1 to 6 nucleotides or about 5 to 10 nucleotides, e.g., about 7-8 nucleotides or about 8 nucleotides, in length. In some embodiments, the spacer sequence comprises one or more of (i) GGAT; (ii) CACGTG; (iii) GCATGC, or a repeat of one or more of (i)-(iii). In some embodiments, the spacer comprises the nucleotide sequence of GATAGTTA, or a nucleotide sequence having at least one, two, or three modifications, e.g., substitutions, insertions, or deletions, but no more than four modifications, e.g., substitutions, insertions, or deletions, relative to the nucleotide sequence of GATAGTTA.

### Genome Size

[0720] In one embodiment, the AAV particle described herein (e.g., an AAV particle comprising an AAV capsid variant), may comprise a single-stranded or double-stranded viral genome. The size of the viral genome may be small, medium, large or the maximum size. As described above, the viral genome may comprise a promoter and a polyA tail.

[0721] In one embodiment, the viral genome may be a small single stranded viral genome. A small single stranded viral genome may be about 2.1 to about 3.5 kb in size such as, but not limited to, 2.1, 2.2, 2.3, 2.4, 2.5, 2.6, 2.7, 2.8, 2.9, 3.0, 3.1, 3.2, 3.3, 3.4, or 3.5 kb in size.

[0722] In one embodiment, the viral genome may be a small double stranded viral genome. A small double stranded viral genome may be about 1.3 to about 1.7 kb in size such as, but not limited to, 1.3, 1.4, 1.5, 1.6, or 1.7 kb in size.

[0723] In one embodiment, the viral genome may be a medium single stranded viral genome. A medium single stranded viral genome may be about 3.6 to about 4.3 kb in size such as, but not limited to, 3.6, 3.7, 3.8, 3.9, 4.0, 4.1, 4.2 or 4.3 kb in size.

[0724] In one embodiment, the viral genome may be a medium double stranded viral genome. A medium double stranded viral genome may be about 1.8 to about 2.1 kb in size such as, but not limited to, 1.8, 1.9, 2.0, or 2.1 kb in size.

[0725] In one embodiment, the viral genome may be a large single stranded viral genome. A large single stranded viral genome may be about 4.4 to about 6.0 kb in size such as, but not limited to, 4.4, 4.5, 4.6, 4.7, 4.8, 4.9, 5.0, 5.1, 5.2, 5.3, 5.4, 5.5, 5.6, 5.7, 5.8, 5.9 or 6.0 kb in size.

[0726] In one embodiment, the viral genome may be a large double stranded viral genome. A large double stranded viral genome may be about 2.2 to about 3.0 kb in size such as, but not limited to, 2.2, 2.3, 2.4, 2.5, 2.6, 2.7, 2.8, 2.9 or 3.0 kb in size.

### Payloads

[0727] In some embodiments, an AAV particle of the present disclosure (e.g., an AAV particle comprising an AAV capsid variant described herein) comprises a viral genome comprising a nucleic acid encoding a payload. In some embodiments, the encoded payload is an RNAi agent or a polypeptide. A payload of the present disclosure may be, but is not limited to, a peptide, a polypeptide, a protein, an antibody, an RNAi agent, etc.

[0728] In some embodiments, the nucleotide sequence encoding a payload may comprise a combination of coding and non-coding nucleic acid sequences. In some embodiments, the nucleotide sequence encoding the payload may encode a coding or non-coding RNA.

[0729] In some embodiments, the AAV particles described herein, e.g., an AAV particle comprising an AAV capsid variant, comprises a nucleic acid encoding a payload. In some embodiments, the encoded payload comprises a therapeutic protein, an antibody, an enzyme, one or more components of a genome editing system, and/or an RNAi agent (e.g., a dsRNA, siRNA, shRNA, pre-miRNA, pri-miRNA, miRNA, stRNA, lncRNA, piRNA, or snoRNA). In some embodiments, the encoded payload modulates, e.g., increases or decreases, the presence, level, and/or activity of a gene, mRNA, protein, or a combination thereof, e.g., in a cell or a tissue.

### Polypeptides

[0730] In some embodiments, the encoded payload of AAV particle comprising an AAV capsid polypeptide, e.g., an AAV capsid variant, described herein comprises a polypeptide, protein, or peptide, e.g., a polypeptide, protein, or peptide described herein. The nucleic acid encoding the payload, may encode a product of any known gene and/or a recombinant version thereof. In some embodiments, the nucleic acid encoding the payload may encode at least one allele of apolipoprotein E (APOE) such as, but not limited to ApoE2. ApoE3 and/or ApoE4. In one embodiment, the nucleic acid encoding the payload encodes ApoE2 (cys112, cys 158) protein or a fragment or variant thereof. In one embodiment, the nucleic acid encoding the payload encodes an ApoE3 (cys112, arg158) protein or fragment or variant thereof. In one embodiment, the nucleic acid encoding the payload encodes ApoE4 (arg112, arg158). As another non-limiting example, the encoded payload comprises an aromatic L-amin acid decarboxylase (AADC) protein. As another non-limiting example, the encoded payload comprises an antibody, or a fragment thereof. As another non-limiting example, the encoded payload comprises a human survival of motor neuron (SMN) 1 or SMN2 protein, or fragments or variants thereof. As another non-limiting example, the encoded payload region comprises a glucocerebrosidase (GBA1) protein, or a fragment or variant thereof. As another non-limiting example, the encoded payload comprises a granulin precursor or progranulin (GRN) protein, or a fragment or variant thereof. As another non-limiting example, the encoded payload comprises an aspartoacylase (ASPA) protein, or a fragment or variant thereof. As another non-limiting example, the encoded payload comprises a tripeptidyl peptidase I (CLN2) protein, or a fragment or variant thereof. As another non-limiting example, the encoded payload comprises a beta-galactosidase (GLB1) protein, or a fragment or variant thereof. As another non-limiting example, the encoded payload comprises a N-sulphoglucosamine sulphohydrolase (SGSH) protein, or a fragment or variant thereof. As another non-limiting example, the encoded payload comprises an N-acetyl-alpha-glucosaminidase (NAGLU) protein, or a fragment or variant thereof. As another non-limiting example, the encoded payload comprises an iduronate 2-sulfatase (IDS) protein, or a fragment or variant thereof. As another non-limiting example, the encoded payload comprises an intracellular cholesterol transporter (NPC1) protein, or a fragment or variant thereof. As another non-limiting example, the encoded payload comprises a gigaxonin (GAN) protein, or a fragment or variant thereof. The AAV viral genomes encoding polypeptides described herein may be useful in the fields of human disease, viruses, infections veterinary applications and a variety of in vivo and in vitro settings.

[0731] Amino acid sequences of a payload polypeptide encoded by a viral genome described herein, may be translated as a whole polypeptide, a plurality of polypeptides or fragments of polypeptides, which independently may be encoded by one or more nucleic acids, fragments of nucleic acids or variants of any of the aforementioned.

### Antibodies and Antibody Binding Fragments

[0732] In some embodiments, the encoded payload of AAV particle comprising an AAV capsid variant described herein comprises an antibody or antibody binding fragment. In some embodiments, the antibody may be a full antibody, a fragment, or any functional variant thereof. As non-limiting examples, an antibody may be a native antibody (e.g., with two heavy and two light chains), a heavy chain variable region, a light chain variable region, a heavy chain constant region, a light chain constant region, Fab, Fab′, F(ab′)₂, Fv, or scFv fragments, a diabody, a linear antibody, a single-chain antibody, a multi-specific antibody, an intrabody, one or more heavy chain complementarity determining regions (CDR), one or more light chain CDRs, a bi-specific antibody, a monoclonal antibody, a polyclonal antibody, a humanized antibody, an antibody mimetic, an antibody variant, a miniaturized antibody, a unibody, a maxibody, and/or a chimeric antigen receptor. The encoded antibody or antibody binding fragment may be useful in the treatment of a neurological disease, a neurodegenerative disorder, a muscular disease, a neuromuscular disorder, a neuro-oncological disorder, or any disorder associated with the central and/or peripheral nervous systems.

[0733] In some embodiments, the viral genome of the AAV particle (e.g., an AAV particle comprising an AAV capsid variant described herein) may comprise a nucleic acid which has been engineered to enable or enhance the expression of an antibody, or antibody binding fragment thereof.

[0734] In some embodiments, the encoded antibody of the payload of an AAV particle comprising an AAV capsid variant, described herein comprises at least one immunoglobulin variable domain sequence. An antibody may include, for example, full-length, mature antibodies and antigen-binding fragments of an antibody. For example, an antibody can include a heavy (H) chain variable domain sequence (VH), and a light (L) chain variable domain sequence (VL). In another example, an antibody includes two heavy (H) chain variable domain sequences and two light (L) chain variable domain sequence, thereby forming two antigen binding sites, such as Fab, Fab′, F(ab′)2, Fc, Fd, Fd′, Fv, single chain antibodies (scFv for example), single variable domain antibodies, diabodies (Dab) (bivalent and bispecific), and chimeric (e.g., humanized) antibodies, which may be produced by the modification of whole antibodies or those synthesized de novo using recombinant DNA technologies. These functional antibody fragments, e.g., an antibody binding fragments, retain the ability to selectively bind with their respective antigen or receptor.

[0735] In some embodiments, the antibody binding fragment comprises at least one portion of an intact antibody, or recombinant variants thereof, and refers to the antigen binding domain, for example, an antigenic determining variable region of an intact antibody, that is sufficient to confer recognition and specific binding of the antibody fragment to a target, such as an antigen. Examples of antigen binding fragments include: (i) a Fab fragment, a monovalent fragment consisting of the VL, VH, CL and CH1 domains; (ii) a F(ab′)2 fragment, a bivalent fragment comprising two Fab fragments linked by a disulfide bridge at the hinge region; (iii) a Fd fragment consisting of the VH and CH1 domains; (iv) a Fv fragment consisting of the VL and VH domains of a single arm of an antibody, (v) a diabody (dAb) fragment, which consists of a VH domain; (vi) a camelid or camelized variable domain; (vii) a single chain Fv (scFv), see e.g., Bird et al. (1988) Science 242:423-426; and Huston et al. (1988) Proc. Natl. Acad. Sci. USA 85:5879-5883); and (viii) a single domain antibody. These antibody fragments are obtained using conventional techniques known to those with skill in the art, and the fragments are screened for utility in the same manner as are intact antibodies. An antibody fragment can also be incorporated into single domain antibodies, maxibodies, minibodies, nanobodies, intrabodies, diabodies, triabodies, tetrabodies, v-NAR and bis-scFv (see, for example, Hollinger and Hudson, Nature Biotechnology 23:1126-1136, 2005).

[0736] In some embodiments, the encoded antibody of the payload of an AAV particle described herein comprises a multispecific antibody, e.g., it comprises a plurality of immunoglobulin variable domains sequences, wherein a first immunoglobulin variable domain sequence of the plurality has binding specificity for a first epitope and a second immunoglobulin variable domain sequence of the plurality has binding specificity for a second epitope. In some embodiments, the first and second epitopes are on the same antigen, e.g., the same protein (or subunit of a multimeric protein). In some embodiments, the first and second epitopes overlap. In some embodiments, the first and second epitopes do not overlap. In some embodiments, the first and second epitopes are on different antigens, e.g., the different proteins (or different subunits of a multimeric protein). In some embodiments, a multispecific antibody comprises a third, fourth or fifth immunoglobulin variable domain. In some embodiments, a multispecific antibody is a bispecific antibody, a trispecific antibody, or tetraspecific antibody.

[0737] In some embodiments, an encoded multispecific antibody of the payload of an AAV particle described herein is an encoded bispecific antibody. A bispecific antibody has specificity for no more than two antigens. A bispecific antibody is characterized by a first immunoglobulin variable domain sequence which has binding specificity for a first epitope and a second immunoglobulin variable domain sequence that has binding specificity for a second epitope. In some embodiments, the first and second epitopes are on the same antigen, e.g., the same protein (or subunit of a multimeric protein). In some embodiments, the first and second epitopes overlap. In some embodiments, the first and second epitopes do not overlap. In some embodiments, the first and second epitopes are on different antigens, e.g., the different proteins (or different subunits of a multimeric protein).

[0738] An antibody or an antibody binding fragment encoded by a viral genome of an AAV particle described herein, may be, but is not limited to, an antibody or antibody fragment that binds to β-amyloid, APOE, tau, SOD1, TDP-43, huntingtin, and/or synuclein. In some embodiments, the encoded payload comprises an antibody or antibody fragment that binds to a neuro-oncology related target, e.g., HER2, EGFR (e.g., EGFRvIII). In some embodiments, the encoded payload comprises an antibody that binds to HER2/neu. In some embodiments, the encoded payload comprises an antibody that binds to β-amyloid. In some embodiments, the encoded payload comprises an antibody that binds to tau.

### Gene Editing System

[0739] In some embodiments, the encoded payload of AAV particle comprising an AAV capsid variant described herein comprises a gene editing system or one or more components thereof. In some embodiments, the gene editing system comprises nucleic acid sequences that encode proteins having enzymatic activity to (i) selectively induce double or single stranded breaks in a DNA or RNA sequence, or (ii) substitute, insert or delete a particular base or set of bases of a DNA or RNA sequence in the absence of a double or single stranded break in the DNA or RNA. In some embodiments, the gene editing system includes, but is not limited to a CRISPR-Cas system (including different Cas or Cas-related nucleases), a Zinc finger nuclease, a meganuclease, a TALEN or a base editors. In some embodiments, the gene editing system comprises a chromosomal integration of a transgene, e.g., introduced by a parvovirus vector in the absence of an exogenous nuclease or an enzymatic entity.

### RNAi Agents

[0740] In some embodiments, the encoded payload of AAV particle comprising an AAV capsid variant described herein comprises an RNAi agent, e.g., an RNAi agent described herein. In some embodiments, the encoded payload of a viral genome of an AAV particle comprising an AAV capsid variant described herein comprises an RNAi agent, the RNAi, such as but not limited to, a dsRNA, a siRNA, a shRNA, a pre-miRNA, a pri-miRNA, a miRNA, a stRNA, a lncRNA, a piRNA, or a snoRNA. In some embodiments, the encoded payload comprises an RNAi agent for inhibiting expression of a SOD1, MAPT, APOE, HTT, C9ORF72, TDP-43, APP, BACE, SNCA, ATXN1, ATXN3, ATXN7, SCNIA-SCN5A, or SCN8A-SCN11A gene, protein, and/or mRNA. In some embodiments, the RNAi agent encoded by a viral genome described herein inhibits SOD1, MAPT, APOE, HTT, C9ORF72, TDP-43, APP, BACE, SNCA, ATXN1, ATXN3, ATXN7, SCNIA-SCN5A, or SCN8A-SCN11A.

[0741] An AAV particle comprising an AAV capsid variant described herein may comprise a viral genome encoding an RNAi agent, which targets the mRNA of a gene to modulate, e.g., interfere with gene expression and/or protein production.

[0742] In some embodiments, the RNAi agent may target a gene at the location of a single-nucleotide polymorphism (SNP) or variant within the nucleotide sequence of the gene.

[0743] The RNAi agent may be an siRNA duplex, wherein the siRNA duplex contains an antisense strand (guide strand) and a sense strand (passenger strand) hybridized together forming a duplex structure, wherein the antisense strand is complementary to the nucleic acid sequence of the targeted gene, and wherein the sense strand is homologous to the nucleic acid sequence of the targeted gene. In some aspects, the 5′ end of the antisense strand has a 5′ phosphate group and the 3′end of the sense strand contains a 3′ hydroxyl group. In other aspects, there are none, one or 2 nucleotide overhangs at the 3′end of each strand.

[0744] Each strand of an siRNA duplex targeting a gene of interest may be about 19 to 25, 19 to 24 or 19 to 21 nucleotides in length, preferably about 19 nucleotides, 20 nucleotides, 21 nucleotides, 22 nucleotides, 23 nucleotides, 24 nucleotides, or 25 nucleotides in length.

[0745] In one embodiment, an siRNA or dsRNA includes at least two sequences that are complementary to each other. The dsRNA includes a sense strand having a first sequence and an antisense strand having a second sequence. The antisense strand includes a nucleotide sequence that is substantially complementary to at least part of an mRNA encoding the target gene, and the region of complementarity is 30 nucleotides or less, and at least 15 nucleotides in length. Generally, the dsRNA is 19 to 25, 19 to 24 or 19 to 21 nucleotides in length. In some embodiments, the dsRNA is from about 15 to about 25 nucleotides in length, and in other embodiments the dsRNA is from about 25 to about 30 nucleotides in length. In some embodiments, the dsRNA is about 15 nucleotides in length, 16 nucleotides in length, 17 nucleotides in length, 18 nucleotides in length, 19 nucleotides, 20 nucleotides, 21 nucleotides, 22 nucleotides, 23 nucleotides, 24 nucleotides, 25 nucleotides in length, 26 nucleotides in length, 27 nucleotides in length, 28 nucleotides in length, 29 nucleotides in length, or 30 nucleotides in length.

[0746] In some embodiments, the encoded RNAi agent is an siRNA.

[0747] In some embodiments, the RNAi agent, e.g., an RNAi agent described herein inhibits the expression of the gene, mRNA, and/or protein by at least 10%, at least 20%, at least 25%, at least 30%, at least 35% or at least 40% or more, such as when assayed by a method known in the art. In some embodiments, the RNAi agent inhibits expression of a gene, mRNA, and protein by 50-100%, e.g., by 30%, 40%, 50%, 60%, 70%, 80%, 85%, 90%, 95% and 100%.

[0748] In some embodiments, the AAV particle described herein, comprising a viral genome encoding an RNAi agent targeting a gene of interest is administered to a subject in need for treating and/or ameliorating a disease, e.g., a neurological disorder of any disease associated with the central or peripheral nervous systems.

Design of siRNA

[0749] An AAV particle described herein (e.g., an AAV particle comprising an AAV capsid variant described herein) may comprise a viral genome encoding a siRNA molecule (e.g., siRNA duplex or encoded dsRNA) that target a gene of interest and suppress target gene expression, mRNA expression, and protein production. In some aspects, the siRNA molecules are designed and used to knock out target gene variants in cells, e.g., transcripts that are identified in neurological disease. In some aspects, the siRNA molecules are designed and used to knock down target gene variants in cells.

[0750] Some guidelines for designing siRNAs (for insertion into a viral genome of the AAV particles described herein) have been proposed in the art. These guidelines generally recommend generating a 19-nucleotide duplexed region, symmetric 2-3 nucleotide 3′overhangs, 5-phosphate and 3-hydroxyl groups targeting a region in the gene to be silenced. Other rules that may govern siRNA sequence preference include, but are not limited to, (i) A/U at the 5′ end of the antisense strand; (ii) G/C at the 5′ end of the sense strand; (iii) at least five A/U residues in the 5′ terminal one-third of the antisense strand; and (iv) the absence of any GC stretch of more than 9 nucleotides in length. In accordance with such considerations, together with the specific sequence of a target gene, highly effective siRNA molecules essential for suppressing mammalian target gene expression may be readily designed.

[0751] In one embodiment, the sense and/or antisense strand is designed based on the method and rules outlined in European Patent Publication No. EP1752536, the contents of which are herein incorporated by reference in their entirety. As a non-limiting example, the 3′-terminal base of the sequence is adenine, thymine or uracil. As a non-limiting example, the 5′-terminal base of the sequence is guanine or cytosine. As a non-limiting example, the 3′-terminal sequence comprises seven bases rich in one or more bases of adenine, thymine and uracil.

[0752] In one embodiment, an siRNA molecule comprises a sense strand and a complementary antisense strand in which both strands are hybridized together to form a duplex structure. The antisense strand has sufficient complementarity to the target mRNA sequence to direct target-specific RNAi, e.g., the siRNA molecule has a sequence sufficient to trigger the destruction of the target mRNA by the RNAi machinery or process.

[0753] In some embodiments, the antisense strand and target mRNA sequences have 100% complementarity. The antisense strand may be complementary to any part of the target mRNA sequence. Neither the identity of the sense sequence nor the homology of the antisense sequence need be 100% complementary to the target.

[0754] In other embodiments, the antisense strand and target mRNA sequences comprise at least one mismatch. As a non-limiting example, the antisense strand and the target mRNA sequence have at least 50-90%, 50-95%, 50-99%, 60-70%, 60-80%, 60-90%, 60-95%, 60-99%, 70-80%, 70-90%, 70-95%, 70-99%, 80-90%, 80-95%, 80-99%, 90-95%, 90-99% or 95-99% complementary.

[0755] The siRNA molecule may have a length from about 10-50 or more nucleotides, e.g., each strand comprising 10-50 nucleotides (or nucleotide analogs). Preferably, the siRNA molecule has a length from about 15-30, e.g., 15, 16, 17, 18, 19, 20, 21, 22, 23, 24, 25, 26, 27, 28, 29, or 30 nucleotides in each strand, wherein one of the strands is sufficiently complementary to a target region. In one embodiment, the siRNA molecule has a length from about 19 to 25, 19 to 24 or 19 to 21 nucleotides.

[0756] In some embodiments, the siRNA molecule can be a synthetic RNA duplex comprising about 19 nucleotides to about 25 nucleotides, and two overhanging nucleotides at the 3′-end.

[0757] The siRNA molecule may comprise an antisense sequence and a sense sequence, or a fragment or variant thereof. As a non-limiting example, the antisense sequence and the sense sequence have at least 50-90%, 50-95%, 50-99%, 60-70%, 60-80%, 60-90%, 60-95%, 60-99%, 70-80%, 70-90%, 70-95%, 70-99%, 80-90%, 80-95%, 80-99%, 90-95%, 90-99% or 95-99% complementary.

[0758] The sense and antisense sequences may be completely complementary across a substantial portion of their length. In other embodiments, the sense sequence and antisense sequence may be at least 70, 80, 90, 95 or 99% complementary across independently at least 50, 60, 70, 80, 85, 90, 95, or 99% of the length of the strands.

[0759] In some embodiments, the sense and antisense strands of a siRNA duplex are linked by a short spacer sequence leading to the expression of a stem-loop structure termed short hairpin RNA (shRNA). The hairpin is recognized and cleaved by Dicer, thus generating mature siRNA molecules.

[0760] In some embodiments, the siRNA molecules, as well as associated spacer and/or flanking regions once designed, can be encoded by the viral genome of the AAV particles described herein, for delivery to a cell.

### Molecular Scaffold

[0761] In some embodiments, the siRNA molecules may be encoded in a modulatory polynucleotide which also comprises a molecular scaffold.

[0762] In some embodiments, the modulatory polynucleotide which comprises the payload (e.g., siRNA, miRNA or other RNAi agent described herein) includes a molecular scaffold which comprises a 5′ flanking sequence, a loop region, and/or a 3′ flanking region. In some embodiments a 5′ or 3′ flanking region may be of any length and may a wild type microRNA sequence or a portion thereof, or may be completely artificial. A 3′ flanking sequence may mirror the 5′ flanking sequence in size and origin. Either flanking sequence may be absent. In one embodiment, both the 5′ and 3′ flanking sequences are absent. The 3′ flanking sequence may optionally contain one or more CNNC motifs, where “N” represents any nucleotide. In some embodiments, the loop comprises at least one UGUG motif. In some embodiments, the UGUG motif is located at the 5′ terminus of the loop. In some embodiments the 5′ and 3′ flanking sequences are the same sequence. In some embodiments they differ by 2%, 3%, 4%, 5%, 10%, 20% or more than 30% when aligned to each other.

[0763] In some embodiments, modulatory polynucleotide comprises a stem loop structure. In some embodiments, the modulatory polynucleotide comprises in 5′ to 3′ order: a 5′ flanking sequence, a guide strand sequence, a loop region, a passenger strand sequence, and a 3′ flanking sequence. In some embodiments, the modulatory polynucleotide comprises in 5′ to 3′ order: a 5′ flanking sequence, a passenger strand sequence, a loop region, a guide strand sequence, and a 3′ flanking sequence.

[0764] In one embodiment, the molecular scaffold comprises a dual-function targeting modulatory polynucleotide.

[0765] In one embodiment, the molecular scaffold may comprise one or more linkers known in the art. The linkers may separate regions or one molecular scaffold from another. As a non-limiting example, the molecular scaffold may be polycistronic.

[0766] In one embodiment, the modulatory polynucleotide is designed using at least one of the following properties: loop variant, seed mismatch/bulge/wobble variant, stem mismatch, loop variant and basal stem mismatch variant, seed mismatch and basal stem mismatch variant, stem mismatch and basal stem mismatch variant, seed wobble and basal stem wobble variant, or a stem sequence variant.

### AAV Production

[0767] Viral production disclosed herein describes processes and methods for producing AAV particles (with enhanced, improved and/or increased tropism for a target tissue), e.g., an AAV particle comprising an AAV capsid variant that may be used to contact a target cell to deliver a payload.

[0768] In some embodiments, disclosed herein is a method of making AAV particle of the present disclosure, e.g., an AAV particle comprising an AAV capsid variant the method comprising: (i) providing a host cell comprising a viral genome described herein and (ii) incubating the host cell under conditions suitable to enclose the viral genome in an AAV capsid variant, e.g., an AAV capsid variant described herein (e.g., an AAV capsid variant listed in Tables 3, 4, or 5), thereby making the AAV particle. In some embodiments, the method comprises prior to step (i), introducing a first nucleic acid comprising the viral genome into a cell. In some embodiments, the host cell comprises a second nucleic acid encoding the AAV capsid variant. In some embodiments, the second nucleic acid is introduced into the host cell prior to, concurrently with, or after the first nucleic acid molecule. In some embodiments, the AAV particle described herein is an isolated AAV particle. In some embodiments, the AAV particle described herein is a recombinant AAV particle.

[0769] Any method known in the art may be used for the preparation of AAV particles. In some embodiments, AAV particles are produced in mammalian cells (e.g., HEK293). In another embodiment, AAV particles are produced in insect cells (e.g., Sf9).

[0770] Methods of making AAV particles are well known in the art and are described in e.g., U.S. Pat. Nos. U.S. Pat. Nos. 6,204,059, 5,756,283, 6,258,595, 6,261,551, 6,270,996, 6,281,010, 6,365,394, 6,475,769, 6,482,634, 6,485,966, 6,943,019, 6,953,690, 7,022,519, 7,238,526, 7,291,498 and 7,491,508, 5,064,764, 6,194,191, 6,566,118, 8,137,948; or International Publication Nos. WO1996039530, WO1998010088, WO1999014354, WO1999015685, WO1999047691, WO2000055342. WO2000075353 and WO2001023597; Methods In Molecular Biology, ed. Richard, Humana Press, NJ (1995); O'Reilly et al., Baculovirus Expression Vectors, A Laboratory Manual, Oxford Univ. Press (1994); Samulski et al., J. Vir. 63:3822-8 (1989); Kajigaya et al., Proc. Nat'l. Acad. Sci. USA 88:4646-50 (1991); Ruffing et al., J. Vir. 66:6922-30 (1992); Kimbauer et al., Vir., 219:37-44 (1996); Zhao et al., Vir. 272:382-93 (2000); the contents of each of which are herein incorporated by reference in their entirety. In some embodiments, the AAV particles are made using the methods described in International Patent Publication WO2015191508, the contents of which are herein incorporated by reference in their entirety.

### Therapeutic Applications

[0771] The present disclosure provides a method for treating a disease, disorder and/or condition in a subject, including a human subject, comprising administering to the subject an AAV particle described herein, e.g., an AAV particle comprising an AAV capsid variant (e.g., an AAV capsid variant described herein), or administering to the subject any of the described compositions, including a pharmaceutical composition, described herein.

[0772] In some embodiments, the AAV particle of the present disclosure (e.g., an AAV particle comprising an AAV capsid variant) are administered to a subject prophylactically, to prevent on-set of disease. In another embodiment, the AAV particle (e.g., an AAV particle comprising an AAV capsid variant) of the present disclosure are administered to treat (e.g., lessen the effects of) a disease or symptoms thereof. In yet another embodiment, the AAV particle of the present disclosure (e.g., an AAV particle comprising an AAV capsid variant) are administered to cure (eliminate) a disease. In another embodiment, the AAV particle (e.g., an AAV particle comprising an AAV capsid variant) of the present disclosure are administered to prevent or slow progression of disease. In yet another embodiment, the AAV particle (e.g., an AAV particle comprising an AAV capsid variant) of the present disclosure are used to reverse the deleterious effects of a disease. Disease status and/or progression may be determined or monitored by standard methods known in the art.

[0773] In some embodiments, the AAV particle of the disclosure (e.g., an AAV particle comprising an AAV capsid variant) is useful for treatment, prophylaxis, palliation or amelioration of a genetic disorder, e.g., an autosomal dominant genetic disorder, an autosomal recessive disorder, X-linked dominant genetic disorder, an X-linked recessive genetic disorder, or a Y-linked genetic disorder. In some embodiments, the genetic disorder is a monogenetic disorder or a polygenic disorder. In some embodiments, treatment of a genetic disorder, e.g., a monogenic disorder, comprises the use of an AAV particle described herein (e.g., an AAV particle comprising an AAV capsid variant described herein) for a gene replacement therapy.

[0774] In some embodiments, provided herein is method for treating a neurological disorder and/or neurodegenerative disorder in a subject, comprising administering to the subject an effective amount of a pharmaceutical composition described herein or an AAV particle, e.g., a plurality of particles, comprising an AAV capsid variant described herein. In some embodiments, treatment of a neurological disorder and/or neurodegenerative disorder comprises prevention of said neurological disorder and/or neurological disorder.

[0775] In some embodiments, the AAV particle (e.g., an AAV particle comprising an AAV capsid variant) of the disclosure is useful for the treatment, prophylaxis, palliation or amelioration of neurological diseases and/or disorders. In some embodiments, the AAV particle of the disclosure (e.g., an AAV particle comprising an AAV capsid variant) is useful for the treatment, prophylaxis, palliation or amelioration of tauopathy.

[0776] In some embodiments, the AAV particle of the disclosure (e.g., an AAV particle comprising an AAV capsid variant) is for the treatment, prophylaxis, palliation or amelioration of Alzheimer's Disease. In some embodiments, treatment of Alzheimer's Disease comprises the use of an AAV particle described herein (e.g., an AAV particle comprising an AAV capsid variant described herein) for a gene replacement therapy. In some embodiments, the payload encoded by an AAV particle comprising a capsid variant described herein comprises an ApoE2 protein, ApoE4 protein, an ApoE3 protein, BDNF protein, CYP46A1 protein, Klotho protein, fractalkine (FKN) protein, neprilysin protein (NEP), CD74 protein, caveolin-1, or a combination or variant thereof. In some embodiments, treatment of Alzheimer's Disease comprises the use of an AAV particle described herein (e.g., an AAV particle comprising an AAV capsid variant described herein) for a reduction in the expression of a tau gene and/or protein, a synuclein gene and/or protein, or a combination or variant thereof. In some embodiments, the payload encoded by an AAV particle comprising a capsid variant described herein comprises an antibody that binds to tau or synuclein, an RNAi agent for inhibiting tau or synuclein, a gene editing system (e.g., a CRISPR-Cas system) for altering tau or synuclein expression, or a combination thereof.

[0777] In some embodiments, the AAV particle of the disclosure (e.g., an AAV particle comprising an AAV capsid variant) is for the treatment, prophylaxis, palliation or amelioration of frontal temporal dementia. In some embodiments, treatment of frontal temporal dementia comprises the use of an AAV particle described herein (e.g., an AAV particle comprising an AAV capsid variant described herein) for a gene replacement therapy. In some embodiments, the payload encoded by an AAV particle comprising a capsid variant described herein comprises a progranulin protein or variant thereof.

[0778] In some embodiments, the AAV particle of the disclosure (e.g., an AAV particle comprising an AAV capsid variant) is useful for the treatment, prophylaxis, palliation or amelioration of Parkinson's Disease. In some embodiments, treatment of Parkinson's disease comprises the use of an AAV particle described herein (e.g., an AAV particle comprising an AAV capsid variant described herein) for a gene replacement therapy. In some embodiments, the payload encoded by an AAV particle comprising a capsid variant described herein comprises an AADC protein, GAD protein, GDNF protein, TH-GCH1 protein, GBA protein, AIMP2-DX2 protein, or a combination or variant thereof. In some embodiments, treatment of Parkinson's disease comprises the use of an AAV particle described herein (e.g., an AAV particle comprising an AAV capsid variant described herein) for a gene knock-down therapy or a gene editing therapy (e.g., knock-out, repression, or correction). In some embodiments, the payload encoded by an AAV particle comprising a capsid variant described herein comprises a modulator, e.g., an RNAi agent or a CRISPR-Cas system, for altering expression of an alpha-synuclein gene, mRNA, and/or protein, or variant thereof. In some embodiments, the AAV particle of the disclosure (e.g., an AAV particle comprising an AAV capsid variant) is useful for the treatment, prophylaxis, palliation or amelioration of an AADC deficiency. In some embodiments, treatment of AADC deficiency comprises the use of an AAV particle described herein (e.g., an AAV particle comprising an AAV capsid variant described herein) for a gene replacement therapy. In some embodiments, the payload encoded by an AAV particle comprising a capsid variant described herein comprises an AADC protein or variant thereof.

[0779] In some embodiments, the AAV particle of the disclosure (e.g., an AAV particle comprising an AAV capsid variant) is useful for the treatment, prophylaxis, palliation or amelioration of Amyotrophic lateral sclerosis. In some embodiments, treatment of ALS comprises the use of an AAV particle described herein (e.g., an AAV particle comprising an AAV capsid variant described herein) for a gene replacement therapy. In some embodiments, the payload encoded by an AAV particle comprising a capsid variant described herein comprises an TDP-43 protein, UPF1 protein, C9orf72 protein, CCNF protein, HSF1 protein, Factor H protein, NGF protein, ADAR2 protein, GDNF protein, VEGF protein, HGF protein, NRTN protein, AIMP2-DX2 protein, or a combination or variant thereof. In some embodiments, treatment of ALS comprises the use of an AAV particle described herein (e.g., an AAV particle comprising an AAV capsid variant described herein) for a gene knock-down therapy or a gene editing therapy (e.g., knock-out, repression, or correction). In some embodiments, the payload encoded by an AAV particle comprising a capsid variant described herein comprises a modulator, e.g., an RNAi agent or a CRISPR-Cas system, for altering expression of a SOD1 or C9ORF72 gene, mRNA, and/or protein, or a combination or variant thereof.

[0780] In some embodiments, the AAV particle of the disclosure (e.g., an AAV particle comprising an AAV capsid variant) is useful for the treatment, prophylaxis, palliation or amelioration of Huntington's Disease. In some embodiments, treatment of ALS comprises the use of an AAV particle described herein (e.g., an AAV particle comprising an AAV capsid variant described herein) for a gene knock-down (e.g., knock-out) therapy or a gene editing therapy (e.g., knock-out, repression, or correction). In some embodiments, the payload encoded by an AAV particle comprising a capsid variant described herein comprises a modulator, e.g., an RNAi agent or a CRISPR-Cas system, for altering expression of an HTT gene, mRNA, and/or protein, or a variant thereof.

[0781] In some embodiments, the AAV particle of the disclosure (e.g., an AAV particle comprising an AAV capsid variant) is useful for the treatment, prophylaxis, palliation or amelioration of spinal muscular atrophy. In some embodiments, treatment of spinal muscular atrophy comprises the use of an AAV particle described herein (e.g., an AAV particle comprising an AAV capsid variant described herein) for a gene replacement therapy. In some embodiments, the payload encoded by an AAV particle comprising a capsid variant described herein comprises an SMN1 protein, an SMN2 protein, or a combination or variant thereof.

[0782] In some embodiments, the AAV particle of the disclosure (e.g., an AAV particle comprising an AAV capsid variant) is useful for the treatment, prophylaxis, palliation or amelioration of multiple system atrophy. In some embodiments, treatment of multiple system atrophy comprises the use of an AAV particle described herein (e.g., an AAV particle comprising an AAV capsid variant described herein) for a gene replacement therapy.

[0783] In some embodiments, the AAV particle of the disclosure (e.g., an AAV particle comprising an AAV capsid variant) is useful for the treatment, prophylaxis, palliation or amelioration of Gaucher disease (GD) (e.g., Type 1 GD. Type 2 GD, or Type 3 GD). In some embodiments, the AAV particle of the disclosure (e.g., an AAV particle comprising an AAV capsid variant) is useful for the treatment, prophylaxis, palliation or amelioration of Parkinson's disease associated with a GBA mutation. In some embodiments, the AAV particle of the disclosure (e.g., an AAV particle comprising an AAV capsid variant) is useful for the treatment, prophylaxis, palliation or amelioration of dementia with Lewy Bodies (DLB).

[0784] In some embodiments, the AAV particle of the disclosure (e.g., an AAV particle comprising an AAV capsid variant) is useful for treatment, prophylaxis, palliation or amelioration of a leukodystrophy, e.g., Alexander disease, autosomal dominant leukodystrophy with autonomic diseases (ADLD), Canavan disease, cerebrotendinous xanthomatosis (CTX), metachromatic leukodystrophy (MLD), Pelizaeus-Merzbacher disease, or Refsum disease. In some embodiments, treatment of MLD comprises the use of an AAV particle described herein (e.g., an AAV particle comprising an AAV capsid variant described herein) for a gene replacement therapy. In some embodiments, the payload encoded by an AAV particle comprising a capsid variant described herein comprises an ARSA protein or variant thereof. In some embodiments, treatment of ALD comprises the use of an AAV particle described herein (e.g., an AAV particle comprising an AAV capsid variant described herein) for a gene replacement therapy. In some embodiments, the payload encoded by an AAV particle comprising a capsid variant described herein comprises an ABCD-1 protein or variant thereof.

[0785] In some embodiments, the AAV particle of the disclosure (e.g., an AAV particle of megalencephalic leukoencephalopathy (MLC). In some embodiments, treatment of MLC comprises the use of an AAV particle described herein (e.g., an AAV particle comprising an AAV capsid variant described herein) for a gene replacement therapy. In some embodiments, the payload encoded by an AAV particle comprising a capsid variant described herein comprises an MLC1 protein or variant thereof.

[0786] In some embodiments, the AAV particle of the disclosure (e.g., an AAV particle comprising an AAV capsid variant) is useful for the treatment, prophylaxis, palliation, or amelioration of Krabbe disease. In some embodiments, treatment of Krabbe disease comprises the use of an AAV particle described herein (e.g., an AAV particle comprising an AAV capsid variant described herein) for a gene replacement therapy. In some embodiments, the payload encoded by an AAV particle comprising a capsid variant described herein comprises a GALC protein or variant thereof.

[0787] In some embodiments, the AAV particle of the disclosure (e.g., an AAV particle comprising an AAV capsid variant) is useful for the treatment, prophylaxis, palliation, or amelioration of Mucopolysaccharidosis, e.g., a Type I (MPS I), Type II (MPS II), Type IIIA (MPS IIIA), Type IIIB (MPS IIIB), or Type IIIC (MPS IIIC). In some embodiments, treatment of Mucopolysaccharidosis comprises the use of an AAV particle described herein (e.g., an AAV particle comprising an AAV capsid variant described herein) for a gene replacement therapy or a gene editing therapy (e.g., enhancement or correction). In some embodiments, the payload encoded or corrected by an AAV particle comprising a capsid variant described herein comprises an IDUA protein, IDS protein, SGSH protein, NAGLU protein, HGSNAT protein, or a combination or variant thereof.

[0788] In some embodiments, the AAV particle of the disclosure (e.g., an AAV particle comprising an AAV capsid variant) is useful for the treatment, prophylaxis, palliation, or amelioration of Batten/NCL. In some embodiments, treatment of Batten/NCL comprises the use of an AAV particle described herein (e.g., an AAV particle comprising an AAV capsid variant described herein) for a gene replacement therapy. In some embodiments, the payload encoded by an AAV particle comprising a capsid variant described herein comprises a CLN1 protein, CLN2 protein, CLN3 protein, CLN5 protein, CLN6 protein, CLN7 protein, CLN8 protein, or a combination or variant thereof.

[0789] In some embodiments, the AAV particle of the disclosure (e.g., an AAV particle comprising an AAV capsid variant) is useful for the treatment, prophylaxis, palliation or amelioration of Rett Syndrome. In some embodiments, treatment of Rett Syndrome comprises the use of an AAV particle described herein (e.g., an AAV particle comprising an AAV capsid variant described herein) for a gene replacement therapy. In some embodiments, the payload encoded by an AAV particle comprising a capsid variant described herein comprises an MeCP2 protein or variant thereof.

[0790] In some embodiments, the AAV particle of the disclosure (e.g., an AAV particle of Angelman Syndrome. In some embodiments, treatment of Angelman Syndrome comprises the use of an AAV particle described herein (e.g., an AAV particle comprising an AAV capsid variant described herein) for a gene replacement therapy. In some embodiments, the payload encoded by an AAV particle comprising a capsid variant described herein comprises a UBE3A protein or variant thereof.

[0791] In some embodiments, the AAV particle of the disclosure (e.g., an AAV particle comprising an AAV capsid variant) is useful for the treatment, prophylaxis, palliation, or amelioration of Fragile X Syndrome. In some embodiments, treatment of Fragile X Syndrome comprises the use of an AAV particle described herein (e.g., an AAV particle comprising an AAV capsid variant described herein) for a gene replacement therapy. In some embodiments, the payload encoded by an AAV particle comprising a capsid variant described herein comprises a Reelin protein, a DgkK protein, a FMR1 protein, or a combination or variant thereof.

[0792] In some embodiments, the AAV particle of the disclosure (e.g., an AAV particle comprising an AAV capsid variant) is useful for the treatment, prophylaxis, palliation, or amelioration of Canavan Disease. In some embodiments, treatment of Canavan Disease comprises the use of an AAV particle described herein (e.g., an AAV particle comprising an AAV capsid variant described herein) for a gene replacement therapy. In some embodiments, the payload encoded by an AAV particle comprising a capsid variant described herein comprises an ASPA protein or variant thereof.

[0793] In some embodiments, the AAV particle of the disclosure (e.g., an AAV particle comprising an AAV capsid variant) is useful for the treatment, prophylaxis, palliation, or amelioration of a Gangliosidosis, e.g., a GM1 Gangliosidosis or a GM2 Gangliosidosis (e.g., Tay Sachs Sandhoff). In some embodiments, treatment of a Gangliosidosis, e.g., a GM1 Gangliosidosis or a GM2 Gangliosidosis (e.g., Tay Sachs Sandhoff), comprises the use of an AAV particle described herein (e.g., an AAV particle comprising an AAV capsid variant described herein) for a gene replacement therapy. In some embodiments, the payload encoded by an AAV particle comprising a capsid variant described herein comprises a GLB1 protein, a HEXA protein, a HEXB protein, a GM2A protein, or a combination or variant thereof.

[0794] In some embodiments, the AAV particle of the disclosure (e.g., an AAV particle comprising an AAV capsid variant) is useful for the treatment, prophylaxis, palliation, or amelioration of GM3 Synthase Deficiency. In some embodiments, treatment of GM3 Synthase Deficiency comprises the use of an AAV particle described herein (e.g., an AAV particle comprising an AAV capsid variant described herein) for a gene replacement therapy. In some embodiments, the payload encoded by an AAV particle comprising a capsid variant described herein comprises an ST3GAL5 protein or variant thereof.

[0795] In some embodiments, the AAV particle of the disclosure (e.g., an AAV particle of a Niemann-Pick disorder, e.g., a Niemann-Pick A or a Niemann-Pick C1 (NPC-1). In some embodiments, treatment of a Niemann-Pick disorder, e.g., a Niemann-Pick A or a Niemann-Pick C1 (NPC-1) comprises the use of an AAV particle described herein (e.g., an AAV particle comprising an AAV capsid variant described herein) for a gene replacement therapy. In some embodiments, the payload encoded by an AAV particle comprising a capsid variant described herein comprises an ASM protein, an NPC1 protein, or variant thereof.

[0796] In some embodiments, the AAV particle of the disclosure (e.g., an AAV particle comprising an AAV capsid variant) is useful for the treatment, prophylaxis, palliation, or amelioration of Schwannoma (e.g., Neuroma). In some embodiments, treatment of Schwannoma (e.g., Neuroma) comprises the use of an AAV particle described herein (e.g., an AAV particle comprising an AAV capsid variant described herein) for a gene replacement therapy. In some embodiments, the payload encoded by an AAV particle comprising a capsid variant described herein comprises a Caspase-1 protein or variant thereof.

[0797] In some embodiments, the AAV particle of the disclosure (e.g., an AAV particle comprising an AAV capsid variant) is useful for the treatment, prophylaxis, palliation, or amelioration of a Tuberous Sclerosis, e.g., Tuberous Sclerosis Type 1 or Tuberous Sclerosis Type 2. In some embodiments, treatment of Tuberous Sclerosis, e.g., Tuberous Sclerosis Type 1 or Tuberous Sclerosis Type 2 comprises the use of an AAV particle described herein (e.g., an AAV particle comprising an AAV capsid variant described herein) for a gene replacement therapy. In some embodiments, the payload encoded by an AAV particle comprising a capsid variant described herein comprises a TSC1 protein, a TSC2 protein, or variant thereof.

[0798] In some embodiments, the AAV particle of the disclosure (e.g., an AAV particle comprising an AAV capsid variant) is useful for the treatment, prophylaxis, palliation, or amelioration of a CDKL5 Deficiency. In some embodiments, treatment of a CDKL5 Deficiency comprises the use of an AAV particle described herein (e.g., an AAV particle comprising an AAV capsid variant described herein) for a gene replacement therapy. In some embodiments, the payload encoded by an AAV particle comprising a capsid variant described herein comprises a CDKL5 protein or variant thereof.

[0799] In some embodiments, the AAV particle of the disclosure (e.g., an AAV particle comprising an AAV capsid variant) is useful for the treatment, prophylaxis, palliation, or amelioration of a Charcot-Marie-Tooth disorder, e.g., a Charcot-Marie-Tooth Type 1X (CMT1X) disorder, a Charcot-Marie-Tooth Type 2A (CMT2A) disorder, or a Charcot-Marie-Tooth Type 4J (CMT4J) disorder. In some embodiments, treatment of a Charcot-Marie-Tooth disorder, e.g., a Charcot-Marie-Tooth Type 1X (CMT1X) disorder, a Charcot-Marie-Tooth Type 2A (CMT2A) disorder, or a Charcot-Marie-Tooth Type 4J (CMT4J) disorder, comprises the use of an AAV particle described herein (e.g., an AAV particle comprising an AAV capsid variant described herein) for a gene replacement therapy. In some embodiments, the payload encoded by an AAV particle comprising a capsid variant described herein comprises a GJB1 protein, a MFN2 protein, a FIG4 protein, or variant thereof.

[0800] In some embodiments, the AAV particle of the disclosure (e.g., an AAV particle comprising an AAV capsid variant) is useful for the treatment, prophylaxis, palliation, or amelioration of an Aspartylglucosaminuria (AGU). In some embodiments, treatment of an AGU comprises the use of an AAV particle described herein (e.g., an AAV particle comprising an AAV capsid variant described herein) for a gene replacement therapy. In some embodiments, the payload encoded by an AAV particle comprising a capsid variant described herein comprises an AGA protein or variant thereof.

[0801] In some embodiments, the AAV particle of the disclosure (e.g., an AAV particle comprising an AAV capsid variant) is useful for the treatment, prophylaxis, palliation, or amelioration of a Leigh Syndrome. In some embodiments, treatment of a Leigh Syndrome comprises the use of an AAV particle described herein (e.g., an AAV particle comprising an AAV capsid variant described herein) for a gene replacement therapy. In some embodiments, the payload encoded by an AAV particle comprising a capsid variant described herein comprises a SURF1 protein or variant thereof.

[0802] In some embodiments, the AAV particle of the disclosure (e.g., an AAV particle comprising an AAV capsid variant) is useful for the treatment, prophylaxis, palliation, or amelioration of epilepsy. In some embodiments, treatment of epilepsy comprises the use of an AAV particle described herein (e.g., an AAV particle comprising an AAV capsid variant described herein) for a gene replacement therapy. In some embodiments, the payload encoded by an AAV particle comprising a capsid variant described herein comprises an NPY/Y2 protein, a Galanin protein, a Dynorphin protein, an AIMP2-DX2 protein, an SLC6A1 protein, an SLC13A5 protein, a KCNQ2 protein, or variant thereof.

[0803] In some embodiments, the AAV particle of the disclosure (e.g., an AAV particle comprising an AAV capsid variant) is useful for the treatment, prophylaxis, palliation, or amelioration of a Dravet Syndrome. In some embodiments, treatment of Dravet Syndrome comprises the use of an AAV particle described herein (e.g., an AAV particle comprising an AAV capsid variant described herein) for a gene replacement therapy. In some embodiments, the payload encoded by an AAV particle comprising a capsid variant described herein comprises an SCN1a protein, or variant thereof.

[0804] In some embodiments, the AAV particle of the disclosure (e.g., an AAV particle comprising an AAV capsid variant) is useful for the treatment, prophylaxis, palliation, or amelioration of a Duchenne muscular dystrophy (DMD). In some embodiments, treatment of DMD comprises the use of an AAV particle described herein (e.g., an AAV particle comprising an AAV capsid variant described herein) for a gene replacement therapy or enhancement (e.g., correction of exon-skipping), or a gene editing therapy (e.g., enhancement or correction). In some embodiments, the payload encoded or corrected by an AAV particle comprising a capsid variant described herein comprises a Dystrophin gene and/or protein, a Utrophin gene and/or protein, or a GALGT2 gene and/or protein, or a Follistatin gene and/or protein, or a combination or variant thereof.

[0805] In some embodiments, the AAV particle of the disclosure (e.g., an AAV particle comprising an AAV capsid variant) is useful for the treatment, prophylaxis, palliation, or amelioration of Pompe Disease. In some embodiments, treatment of Pompe Disease comprises the use of an AAV particle described herein (e.g., an AAV particle comprising an AAV capsid variant described herein) for a gene replacement therapy. In some embodiments, the payload encoded by an AAV particle comprising a capsid variant described herein comprises a GAA protein, or variant thereof.

[0806] In some embodiments, the AAV particle of the disclosure (e.g., an AAV particle comprising an AAV capsid variant) is useful for the treatment, prophylaxis, palliation, or amelioration of Limb-Girdle Muscular Dystrophy (LGMD2A). In some embodiments, treatment of LGMD2A comprises the use of an AAV particle described herein (e.g., an AAV particle comprising an AAV capsid variant described herein) for a gene replacement therapy. In some embodiments, the payload encoded by an AAV particle comprising a capsid variant described herein comprises a CAPN-3 protein, DYSF protein, a SGCG protein, a SGCA protein, a SGCB protein, a FKRP protein, a ANO5 protein, or a combination or variant thereof.

[0807] In some embodiments, the AAV particle of the disclosure (e.g., an AAV particle comprising an AAV capsid variant) is useful for the treatment, prophylaxis, palliation or amelioration of chronic or neuropathic pain.

[0808] In some embodiments, the AAV particle of the disclosure (e.g., an AAV particle comprising AAV capsid variant) is useful for treatment, prophylaxis, palliation or amelioration of a disease associated with the central nervous system.

[0809] In some embodiments, the AAV particle of the disclosure (e.g., an AAV particle comprising an AAV capsid variant) is useful for treatment, prophylaxis, palliation or amelioration of a disease associated with the peripheral nervous system.

[0810] In some embodiments, provided herein is a method for treating a neuro-oncological disorder in a subject, comprising administering to the subject an effective amount of a pharmaceutical composition described herein or an AAV particle, e.g., a plurality of particles, comprising an AAV capsid variant described herein. In some embodiments, treatment of a neuro-oncological disorder comprises prevention of said neuro-oncological disorder. In some embodiments, a neuro-oncological disorder comprises a cancer of a primary CNS origin (e.g., a CNS cell, a tissue, or a region), or a metastatic cancer in a CNS cell, tissue, or region. Examples of primary CNS cancers could be gliomas (which may include glioblastoma (also known as glioblastoma multiforme), astrocytomas, oligodendrogliomas, and ependymomas, and mixed gliomas), meningiomas, medulloblastomas, neuromas, and primary CNS lymphoma (in the brain, spinal cord, or meninges), among others. Examples of metastatic cancers include those originating in another tissue or organ, e.g., breast, lung, lymphoma, leukemia, melanoma (skin cancer), colon, kidney, prostate, or other types that metastasize to brain.

[0811] In some embodiments, the AAV particle of the disclosure (e.g., an AAV particle comprising an AAV capsid variant) is useful for the treatment, prophylaxis, palliation or amelioration of a disease associated with expression of HER2, e.g., a disease associated with overexpression of HER2. In some embodiments, the AAV particle of the disclosure (e.g., an AAV particle comprising an AAV capsid variant) is useful for the treatment, prophylaxis, palliation or amelioration of a HER2-positive cancer. In some embodiments, the HER2-positive cancer is a HER2-positive solid tumor. Additionally, or alternatively, the HER2-positive cancer may be a locally advanced or metastatic HER2-positive cancer. In some instances, the HER2-positive cancer is a HER2-positive breast cancer or a HER2-positive gastric cancer. In some embodiments, the HER2-positive cancer is selected from the group consisting of a HER2-positive gastroesophageal junction cancer, a HER2-positive colorectal cancer, a HER2-positive lung cancer (e.g., a HER2-positive non-small cell lung carcinoma), a HER2-positive pancreatic cancer, a HER2-positive colorectal cancer, a HER2-positive bladder cancer, a HER2-positive salivary duct cancer, a HER2-positive ovarian cancer (e.g., a HER2-positive epithelial ovarian cancer), or a HER2-positive endometrial cancer. In some instances, the HER2-positive cancer is prostate cancer. In some embodiments, the HER2-positive cancer has metastasized to the central nervous system (CNS). In some instances, the metastasized HER2-cancer has formed CNS neoplasms.

[0812] In some embodiments, the AAV particle of the present disclosure (e.g., an AAV particle comprising an AAV capsid polypeptide, e.g., an AAV capsid variant) is administered to a subject having at least one of the diseases or symptoms described herein. In some embodiments, an AAV particle of the present disclosure is administered to a subject having or diagnosed with having a disease or disorder described herein.

[0813] In some embodiments, provided herein is a method for treating a muscular disorder and/or neuromuscular disorder in a subject, comprising administering to the subject an effective amount of a pharmaceutical composition described herein or an AAV particle, e.g., a plurality of particles, comprising an AAV capsid variant described herein. In some embodiments, treatment of a muscular disorder and/or neuromuscular disorder comprises prevention of said muscular disorder and/or neuromuscular disorder.

[0814] In some embodiments, the AAV particle of the disclosure (e.g., an AAV particle comprising an AAV capsid variant) is useful for treatment, prophylaxis, palliation or amelioration of a cardiac disease or heart disease and/or method of improving (e.g., enhancing) cardiac function in a subject. In some embodiments, the cardiac disease is a cardiomyopathy (e.g., arrhythmogenic right ventricular cardiomyopathy, dilated cardiomyopathy, or hypertrophic cardiomyopathy), congestive heart failure, tachycardia (e.g., catecholaminergic polymorphic ventricular tachycardia), ischemic heart disease, and/or myocardial infarction. In some embodiments, the cardiac disease is a disease associated with expression, e.g., aberrant expression, of LAMP2B, MYBPC3, TNNI3, LMNA, BAG3, DWORF, PKP2, Cx43, TAZ, CASQ2, SERCA2a, I-1c, S100A1 and/or ARC, S100A1, ASCL1, miR133, Mydelta3, Sav, or a combination or variant thereof. In some embodiments, treatment of a cardiac disorder described herein comprises the use of an AAV particle described herein (e.g., an AAV particle comprising an AAV capsid variant described herein) for a gene replacement therapy.

[0815] In some embodiments, the cardiac disease is a genetic disorder, e.g., an autosomal dominant genetic disorder, an autosomal recessive disorder, or an X-linked recessive genetic disorder. In some embodiments, the cardiomyopathy is a genetic disorder, e.g., a genetic disorder associated with an abnormality (e.g., mutation, insertion, rearrangement and/or deletion) in a gene chosen from TTN, LMNA, MYH7, MYH6, SCNSA, TNNT2, RBM20, TNNI3, MYL2, MYL3, PKP2, DSP, DSG2, DSC2, JUP, or a combination thereof. In some embodiments, the cardiac disorder is a dilated cardiomyopathy, e.g., a dilated cardiomyopathy associated with an abnormality (e.g., mutation, insertion, rearrangement and/or deletion) in a gene chosen from TTN, LMNA, MIH7, BAG3, MIPN, TNNT2, SCN5A, RBN20, TNPO, LAMA4, VCL, LDB3, TCAP, PSEN1/2, ACTN2, CRYAB, TPM1, ABCC9, ACTC1, PDLIM3, ILK. TNNC1, TNNI3, PLN, DES, SGCD, CSRP3, MIH6, EYA4, ANKRD1, DMD, GATAD1, TAZ/G4.5, or combination thereof. In some embodiments, the cardiac disorder is a hypertrophic cardiomyopathy, e.g., a hypertrophic cardiomyopathy associated with an abnormality (e.g., mutation, insertion, rearrangement and/or deletion) in a gene chosen from MYH7, TNNT2, TNNI3, TPM1, MYL2, MYL3, ACTC1, CSRP3, TTN, ACTN2, MYH6, TCAP, TNNC1, or a combination thereof. In some embodiments, the cardiac disorder is an arrhythmogenic ventricular cardiomyopathy, e.g., an arrhythmogenic ventricular cardiomyopathy associated with an abnormality (e.g., mutation, insertion, rearrangement and/or deletion) in a gene chosen from PKP2, DSG2, DSP, RYR2, DSC2, TGFB3, TMEM43, DES, TTN, LMNA, or a combination thereof.

[0816] In some embodiments, the AAV particle of the present disclosure (e.g., an AAV particle comprising an AAV capsid polypeptide, e.g., an AAV capsid variant) is administered to a subject having at least one of the diseases or symptoms described herein. In some embodiments, an AAV particle of the present disclosure is administered to a subject having or diagnosed with having a disease or disorder described herein.

[0817] Any neurological disease or disorder, neurodegenerative disorder, muscular disorder, neuromuscular disorder, and/or neuro-oncological disorder may be treated with the AAV particles of the disclosure, or pharmaceutical compositions thereof.

### Pharmaceutical Composition and Formulations

[0818] According to the present disclosure, an AAV particle comprising an AAV capsid variant described herein may be prepared as a pharmaceutical composition. In some embodiments, the pharmaceutical composition comprises at least one active ingredients. In some embodiments, the pharmaceutical composition comprises a pharmaceutically acceptable excipient.

[0819] In some embodiments, an AAV particle of the present disclosure (e.g., an AAV particle comprising an AAV capsid polypeptide, e.g., an AAV capsid variant) can be formulated using an excipient to: (1) increase stability; (2) increase cell transfection or transduction; (3) permit the sustained or delayed expression of the payload; (4) alter the biodistribution (e.g., target the viral particle to specific tissues or cell types); (5) increase the translation of encoded protein; (6) alter the release profile of encoded protein; and/or (7) allow for regulatable expression of the payload. Formulations of the present disclosure can include, without limitation, saline, liposomes, lipid nanoparticles, polymers, peptides, proteins, cells transfected with viral vectors (e.g., for transfer or transplantation into a subject) and combinations thereof.

[0820] In some embodiments, the relative amount of the active ingredient (e.g. an AAV particle comprising an AAV capsid variant described herein), a pharmaceutically acceptable excipient, and/or any additional ingredients in a pharmaceutical composition in accordance with the present disclosure may vary, depending upon the identity, size, and/or condition of the subject being treated and further depending upon the route by which the composition is to be administered. For example, the composition may comprise between 0.1% and 99% (w/w) of the active ingredient. By way of example, the composition may comprise between 0.1% and 100%, e.g., between .5 and 50%, between 1-30%, between 5-80%, at least 80% (w/w) active ingredient.

[0821] In some embodiments, the pharmaceutical composition comprising an AAV particle described herein may comprise an AAV capsid variant and a viral genome encoding a payload, e.g., a payload described herein, with or without a pharmaceutically acceptable excipient.

[0822] The present disclosure also provides in some embodiments, a pharmaceutical composition suitable for administration to a subject, e.g., a human. In some embodiments, the pharmaceutical composition is administered to a subject, e.g., a human.

### Administration

[0823] In some embodiments, an AAV particle disclosed herein (e.g., an AAV particle comprising an AAV capsid variant) may be administered to a subject by a delivery route, e.g., a localized delivery route or a systemic delivery route.

[0824] In some embodiments, an AAV particle described herein (e.g., an AAV particle comprising an AAV capsid variant) may be administered via such a route that it is able to cross the blood-brain barrier, vascular barrier, or other epithelial barrier. In some embodiments, an AAV particle of the present disclosure (e.g., an AAV particle comprising an AAV capsid variant) may be administered in any suitable form, either as a liquid solution or suspension, as a solid form suitable for liquid solution or suspension in a liquid solution. In some embodiments, an AAV particle (e.g., an AAV particle comprising an AAV capsid variant) may be formulated with any appropriate and pharmaceutically acceptable excipient.

[0825] In some embodiments, the AAV particle described herein (e.g., an AAV particle comprising an AAV capsid variant) is administered intramuscularly, intravenously, intracerebrally, intrathecally, intratumorally, intracerebroventricularly, via intraparenchymal administration, or via intra-cisterna magna injection (ICM). In some embodiments, the AAV particle described herein (e.g., an AAV particle comprising an AAV capsid variant) is administered intravenously. In some embodiments, the AAV particle described herein (e.g., an AAV particle comprising an AAV capsid variant) is administered via intra-cisterna magna injection (ICM). In some embodiments, the AAV particle described herein (e.g., an AAV particle comprising an AAV capsid variant) is administered intratumorally. In some embodiments, the AAV particle described herein (e.g., an AAV particle comprising an AAV capsid variant) is administered intraarterially.

[0826] In some embodiments, an AAV particle of the present disclosure (e.g., an AAV particle comprising an AAV capsid variant) may be delivered to a subject via a single route administration. In some embodiments, an AAV particle of the present disclosure may be delivered to a subject via a multi-site route of administration. In some embodiments, a subject may be administered at 2, 3, 4, 5, or more than 5 sites.

[0827] In some embodiments, an AAV particle of the present disclosure (e.g., an AAV particle comprising an AAV capsid variant) is administered via a bolus infusion. In some embodiments, an AAV particle of the present disclosure is administered via sustained delivery over a period of minutes, hours, or days. In some embodiments, the infusion rate may be changed depending on the subject, distribution, formulation, and/or another delivery parameter. In some embodiments, an AAV particle of the present disclosure is administered using a controlled release. In some embodiments, an AAV particle of the present disclosure is administered using a sustained release, e.g., a release profile that conforms to a release rate over a specific period of time.

[0828] In some embodiments, an AAV particle (e.g., an AAV particle comprising an AAV capsid variant) may be delivered by more than one route of administration. As non-limiting examples of combination administrations, an AAV particle may be delivered by intrathecal and intracerebroventricular, or by intravenous and intraparenchymal administration.

### Intravenous Administration

[0829] In some embodiments, an AAV particle described herein (e.g., an AAV particle comprising an AAV capsid variant) may be administered to a subject by systemic administration. In some embodiments, the systemic administration is intravenous administration. In another embodiment, the systemic administration is intraarterial administration. In some embodiments, an AAV particle of the present disclosure may be administered to a subject by intravenous administration. In some embodiments, the intravenous administration may be achieved by subcutaneous delivery. In some embodiments, the AAV particle is administered to the subject via focused ultrasound (FUS), e.g., coupled with the intravenous administration of microbubbles (FUS-MB) or MRI-guided FUS coupled with intravenous administration, e.g., as described in Terstappen et al. (Nat Rev Drug Discovery, https://doi.org/10.1038/s41573-021-00139-y (2021)), the contents of which are incorporated herein by reference in its entirety. In some embodiments, the AAV particle is administered to the subject intravenously. In some embodiments, the subject is a human.

### Administration to the CNS

[0830] In some embodiments, an AAV particle described herein (e.g., an AAV particle comprising an AAV capsid variant) may be delivered by direct injection into the brain. As a non-limiting example, the brain delivery may be by intrahippocampal administration. In some embodiments, an AAV particle of the present disclosure may be administered to a subject by intraparenchymal administration. In some embodiments, the intraparenchymal administration is to tissue of the central nervous system. In some embodiments, an AAV particle of the present disclosure may be administered to a subject by intracranial delivery (See, e.g., U.S. Pat. No. 8,119,611; the content of which is incorporated herein by reference in its entirety). In some embodiments, an AAV particle described herein may be delivered by injection into the CSF pathway. Non-limiting examples of delivery to the CSF pathway include intrathecal and intracerebroventricular administration. In some embodiments, an AAV particle described herein may be administered via intracisternal magna (ICM) injection.

[0831] In some embodiments, an AAV particle of the present disclosure (e.g., an AAV particle comprising an AAV capsid variant) may be delivered to the brain by systemic delivery. As a non-limiting example, the systemic delivery may be by intravascular administration. As a non-limiting example, the systemic or intravascular administration may be intravenous.

[0832] In some embodiments, an AAV particle (e.g., an AAV particle comprising an AAV capsid variant) of the present disclosure may be delivered by an intraocular delivery route. A non-limiting example of an intraocular administration includes an intravitreal injection.

### Intramuscular Administration

[0833] In some embodiments, an AAV particle described herein (e.g., an AAV particle comprising an AAV capsid variant) may be delivered by intramuscular administration. Without wishing to be bound by theory, it is believed in some embodiments, that the multi-nucleated nature of muscle cells provides an advantage to gene transduction subsequent to AAV delivery. In some embodiments, cells of the muscle are capable of expressing recombinant proteins with the appropriate post-translational modifications. Without wishing to be bound by theory, it is believed in some embodiments, the enrichment of muscle tissue with vascular structures allows for transfer to the blood stream and whole-body delivery. Examples of intramuscular administration include systemic (e.g., intravenous), subcutaneous or directly into the muscle. In some embodiments, more than one injection is administered. In some embodiments, an AAV particle of the present disclosure may be delivered by an intramuscular delivery route. (See, e.g., U.S. Pat. No. 6,506,379; the content of which is incorporated herein by reference in its entirety). Non-limiting examples of intramuscular administration include an intravenous injection or a subcutaneous injection.

[0834] In some embodiments, an AAV particle of the present disclosure (e.g., an AAV particle comprising an AAV capsid variant) is administered to a subject and transduces the muscle of a subject. As a non-limiting example, an AAV particle is administered by intramuscular administration. In some embodiments, an AAV particle of the present disclosure may be administered to a subject by subcutaneous administration. In some embodiments, the intramuscular administration is via systemic delivery. In some embodiments, the intramuscular administration is via intravenous delivery. In some embodiments, the intramuscular administration is via direct injection to the muscle.

[0835] In some embodiments, the muscle is transduced by administration, e.g., intramuscular administration. In some embodiments, an intramuscular delivery comprises administration at one site. In some embodiments, an intramuscular delivery comprises administration at more than one site. In some embodiments, an intramuscular delivery comprises administration at two, three, four, or more sites. In some embodiments, intramuscular delivery is combined with at least one other method of administration.

[0836] In some embodiments, an AAV particle pf the present disclosure (e.g., an AAV particle comprising an AAV capsid variant) may be administered to a subject by peripheral injections. Non-limiting examples of peripheral injections include intraperitoneal, intramuscular, intravenous, conjunctival, or joint injection. It was disclosed in the art that the peripheral administration of AAV vectors can be transported to the central nervous system, for example, to the motor neurons (e.g., U. S. Patent Publication Nos. US20100240739 and US20100130594; the content of each of which is incorporated herein by reference in their entirety).

[0837] In some embodiments, an AAV particle of the present disclosure (e.g., an AAV particle comprising an AAV capsid variant) may be administered to a subject by intraparenchymal administration. In some embodiments, the intraparenchymal administration is to muscle tissue. In some embodiments, an AAV particle of the present disclosure is delivered as described in Bright et al 2015 (Neurobiol Aging. 36 (2): 693-709), the contents of which are herein incorporated by reference in their entirety. In some embodiments, an AAV particle of the present disclosure is administered to the gastrocnemius muscle of a subject. In some embodiments, an AAV particle of the present disclosure is administered to the bicep femorii of the subject. In some embodiments, an AAV particles of the present disclosure is administered to the tibialis anterior muscles. In some embodiments, an AAV particle of the present disclosure is administered to the soleus muscle.

### Depot Administration

[0838] As described herein, in some embodiments, a pharmaceutical composition and/or an AAV particle of the present disclosure (e.g., an AAV particle comprising an AAV capsid variant) are formulated in depots for extended release. Generally, specific organs or tissues are targeted for administration.

[0839] In some embodiments, a pharmaceutical composition and/or an AAV particle of the present disclosure (e.g., an AAV particle comprising an AAV capsid variant) are spatially retained within or proximal to target tissues. Provided are methods of providing a pharmaceutical composition, an AAV particle, to target tissues of mammalian subjects by contacting target tissues (which comprise one or more target cells) with the pharmaceutical composition and/or the AAV particle, under conditions such that they are substantially retained in target tissues, e.g., such that at least 10, 20, 30, 40, 50, 60, 70, 80, 85, 90, 95, 96, 97, 98, 99, 99.9, 99.99 or greater than 99.99% of the composition is retained in the target tissues. In some embodiments, retention is determined by measuring the amount of pharmaceutical composition and/or AAV particle that enter a target cell or a plurality of target cells. For example, at least 1%, 5%, 10%, 20%, 30%, 40%, 50%, 60%, 70%, 80%, 85%, 90%, 95%, 96%, 97%, 98%, 99%, 99.9%, 99.99%, or greater than 99.99% of a pharmaceutical composition and/or an AAV particle, administered to a subject are present intracellularly at a period of time following administration. For example, intramuscular injection to a subject may be performed using aqueous compositions comprising a pharmaceutical composition and/or an AAV particle of the present disclosure and a transfection reagent, and retention is determined by measuring the amount of the pharmaceutical composition and/or the AAV particle, present in the muscle cell or plurality of muscle cells.

[0840] In some embodiments, disclosed herein are methods of providing a pharmaceutical composition and/or an AAV particle of the present disclosure (e.g., an AAV particle comprising an AAV capsid variant) to a tissue of a subject, by contacting the tissue (comprising a cell, e.g., a plurality of cells) with the pharmaceutical composition and/or the AAV particle under conditions such that they are substantially retained in the tissue. In some embodiments, a pharmaceutical composition and/or AAV particle described herein comprise a sufficient amount of an active ingredient such that the effect of interest is produced in at least one cell. In some embodiments, a pharmaceutical composition and/or an AAV particle generally comprise one or more cell penetration agents. In some embodiments, the disclosure provides a naked formulations (such as without cell penetration agents or other agents), with or without pharmaceutically acceptable carriers.

### Methods of Treatment

[0841] Provided in the present disclosure are methods for introducing (e.g., delivering) an AAV particle of the present disclosure (e.g., an AAV particle comprising an AAV capsid variant) into cells. In some embodiments, the method comprises introducing into said cells an AAV particle or vector described herein in an amount sufficient to modulate, e.g., increase, the production of a target gene, mRNA, and/or protein. In some embodiments, the method comprises introducing into said cells an AAV particle or vector described herein in an amount sufficient to modulate, e.g., decrease, expression of a target gene, mRNA, and/or protein. In some aspects, the cells may be neurons such as but not limited to, motor, hippocampal, entorhinal, thalamic, cortical, sensory, sympathetic, or parasympathetic neurons, and glial cells such as astrocytes, microglia, and/or oligodendrocytes. In other aspects, the cells may be a muscle cell, e.g., a cell of a diaphragm, a quadriceps, or a heart (e.g., a heart atrium or a heart ventricle). In other embodiments, the cells may be a muscle cell (e.g., a cell of a diaphragm, a quadriceps, or a heart (e.g., a heart atrium or a heart ventricle)) or a liver cell. In some embodiments, the cell may be a heart cell (e.g., a cell of a heart atrium or a cell of a heart ventricle).

[0842] Disclosed in the present disclosure are methods for treating a neurological disease/disorder or a neurodegenerative disorder, a muscular or neuromuscular disorder, or a neuro-oncological disorder associated with aberrant, e.g., insufficient or increased, function/presence of a protein, e.g., a target protein in a subject in need of treatment.

[0843] In some embodiments, the method comprises administering to the subject a therapeutically effective amount of a composition comprising AAV particles of the present disclosure. As a non-limiting example, the AAV particles can increase target gene expression, increase target protein production, and thus reduce one or more symptoms of neurological disease in the subject such that the subject is therapeutically treated.

[0844] In other embodiments, the method comprises administering to the subject a therapeutically effective amount of a composition comprising AAV particles (e.g., an AAV particle comprising an AAV capsid polypeptide, e.g., an AAV capsid variant) comprising a viral genome with a nucleic acid sequence encoding one or more siRNA molecules. As a non-limiting example, the siRNA molecules can silence target gene expression, inhibit target protein production, and reduce one or more symptoms of neurological disease in the subject such that the subject is therapeutically treated.

[0845] In some embodiments, the composition comprising the AAV particles of the present disclosure (e.g., an AAV particle comprising an AAV capsid variant described herein) is administered to the central nervous system of the subject via systemic administration. In some embodiments, the systemic administration is intravenous (IV) injection. In some embodiments, the AAV particle described herein or a pharmaceutical composition comprising an AAV particle described herein is administered by focused ultrasound (FUS), e.g., coupled with the intravenous administration of microbubbles (FUS-MB) or MRI-guided FUS coupled with intravenous administration.

[0846] In some embodiments, the composition comprising the AAV particle of the present disclosure (e.g., an AAV particle comprising an AAV capsid variant) is administered to the central nervous system of the subject via intraventricular administration. In some embodiments, the composition comprising the AAV particle of the present disclosure (e.g., an AAV particle comprising an AAV capsid variant) is administered via intra-cisterna magna injection (ICM).

[0847] In some embodiments, the composition comprising an AAV particle of the present disclosure (e.g., an AAV particle comprising an AAV capsid variant) is administered to the central nervous system of the subject via intraventricular injection and intravenous injection.

[0848] In some embodiments, the composition comprising the AAV particle of the present disclosure (e.g., an AAV particle comprising an AAV capsid variant) is administered to the central nervous system of the subject via ICM injection and intravenous injection at a specific dose per subject. As a non-limiting example, the AAV particles are administered via ICM injection at a dose of 1×10⁴ VG per subject. As a non-limiting example, the AAV particles are administered via IV injection at a dose of 2×10¹³ VG per subject.

[0849] In some embodiments, the composition comprising the AAV particle of the present disclosure (e.g., an AAV particle comprising an AAV capsid variant) is administered to the central nervous system of the subject. In other embodiments, the composition comprising the AAV particles of the present disclosure is administered to a CNS tissue of a subject (e.g., putamen, hippocampus, thalamus, or cortex of the subject).

[0850] In some embodiments, the composition comprising the AAV particle of the present disclosure (e.g., an AAV particle comprising an AAV capsid variant) is administered to the central nervous system of the subject via intraparenchymal injection. Non-limiting examples of intraparenchymal injections include intraputamenal, intracortical, intrathalamic, intrastriatal, intrahippocampal or into the entorhinal cortex.

[0851] In some embodiments, the composition comprising the AAV particle of the present disclosure (e.g., an AAV particle comprising an AAV capsid variant) is administered to the central nervous system of the subject via intraparenchymal injection and intravenous injection.

[0852] In some embodiments, the composition comprising the AAV particle of the present disclosure (e.g., an AAV particle comprising an AAV capsid variant) is administered to the central nervous system of the subject via intraventricular injection, intraparenchymal injection and intravenous injection.

[0853] In some embodiments, the composition comprising an AAV particle (e.g., an AAV particle comprising an AAV capsid variant) of a plurality of particles of the present disclosure is administered to a muscle of the subject via intravenous injection. In some embodiments, the composition comprising an AAV particle of a plurality of particles of the present disclosure is administered to a muscle of the subject via intramuscular injection.

[0854] In some embodiments, an AAV particle of the present disclosure (e.g., an AAV particle comprising an AAV capsid variant) may be delivered into specific types of cells, including, but not limited to, thalamic, hippocampal, entorhinal, cortical, motor, sensory, excitatory, inhibitory, sympathetic, or parasympathetic neurons; glial cells including oligodendrocytes, astrocytes and microglia; and/or other cells surrounding neurons such as T cells. In some embodiments, an AAV particle of the present disclosure may be delivered into a muscle cell, e.g., a cell of the quadriceps, diaphragm, liver, and/or heart (e.g., heart atrium or heart ventricle).

[0855] In some embodiments, an AAV particle (e.g., an AAV particle comprising an AAV capsid polypeptide, e.g., an AAV capsid variant), e.g., a plurality of particles, of the present disclosure may be delivered to a cell or region of the midbrain. In some embodiments, an AAV particle (e.g., an AAV particle comprising an AAV capsid polypeptide, e.g., an AAV capsid variant), e.g., a plurality of particles, of the present disclosure may be delivered to a cell or region of the brains stem.

[0856] In some embodiments, an AAV particle (e.g., an AAV particle comprising an AAV capsid polypeptide, e.g., an AAV capsid variant), e.g., a plurality of particles, of the present disclosure may be delivered to neurons in the putamen, hippocampus, thalamus and/or cortex.

[0857] In some embodiments, an AAV particle (e.g., an AAV particle comprising an AAV capsid variant), e.g., a plurality of particles, of the present disclosure may be used as a therapy for a genetic disorder, e.g., an autosomal dominant genetic disorder, an autosomal recessive disorder, X-linked dominant genetic disorder, an X-linked recessive genetic disorder, or a Y-linked genetic disorder. In some embodiments, the genetic disorder is a monogenetic disorder or a polygenic disorder. In some embodiments, treatment of a genetic disorder, e.g., a monogenic disorder, comprises the use of an AAV particle described herein (e.g., an AAV particle comprising an AAV capsid variant described herein) for a gene replacement therapy.

[0858] In some embodiments, an AAV particle (e.g., an AAV particle comprising an AAV capsid variant), e.g., a plurality of particles, of the present disclosure may be used as a therapy for a neurological disease.

[0859] In some embodiments, an AAV particle (e.g., an AAV particle comprising an AAV capsid variant), e.g., a plurality of particles, of the present disclosure may be used as a therapy for tauopathies.

[0860] In some embodiments, an AAV particle (e.g., an AAV particle comprising an AAV capsid variant), e.g., a plurality of particles, of the present disclosure may be used as a therapy for Alzheimer's Disease.

[0861] In some embodiments, an AAV particle (e.g., an AAV particle comprising an AAV capsid variant), e.g., a plurality of particles, of the present disclosure may be used as a therapy for Amyotrophic Lateral Sclerosis.

[0862] In some embodiments, an AAV particle (e.g., an AAV particle comprising an AAV capsid variant), e.g., a plurality of particles, of the present disclosure may be used as a therapy for Huntington's Disease.

[0863] In some embodiments, an AAV particle (e.g., an AAV particle comprising an AAV capsid variant), e.g., a plurality of particles, of the present disclosure may be used as a therapy for Parkinson's Disease.

[0864] In some embodiments, an AAV particle (e.g., an AAV particle comprising an AAV capsid variant), e.g., a plurality of particles, of the present disclosure may be used as a therapy for Gaucher disease (GD) (e.g., Type 1 GD, Type 2 GD, or Type 3 GD). In some embodiments, an AAV particle (e.g., an AAV particle comprising an AAV capsid variant), e.g., a plurality of particles, of the present disclosure may be used as a therapy for Parkinson's disease associated with a GBA mutation. In some embodiments, an AAV particle (e.g., an AAV particle comprising an AAV capsid variant), e.g., a plurality of particles, of the present disclosure may be used as a therapy for dementia with Lewy Bodies (DLB).

[0865] In some embodiments, an AAV particle (e.g., an AAV particle comprising an AAV capsid variant), e.g., a plurality of particles, of the present disclosure may be used as a therapy for spinal muscular atrophy.

[0866] In some embodiments, an AAV particle (e.g., an AAV particle comprising an AAV capsid variant), e.g., a plurality of particles, of the present disclosure may be used as a therapy for a leukodystrophy, e.g., Alexander disease, autosomal dominant leukodystrophy with autonomic diseases (ADLD), Canavan disease, cerebrotendinous xanthomatosis (CTX), metachromatic leukodystrophy (MLD), Pelizaeus-Merzbacher disease, or Refsum disease.

[0867] In some embodiments, an AAV particle (e.g., an AAV particle comprising an AAV capsid variant), e.g., a plurality of particles, of the present disclosure may be used as a therapy for chronic or neuropathic pain.

[0868] In some embodiments, an AAV particle (e.g., an AAV particle comprising an AAV capsid variant), e.g., a plurality of particles, of the present disclosure may be used as a therapy for a muscular disorder or a neuromuscular disorder.

[0869] In some embodiments, an AAV particle (e.g., an AAV particle comprising an AAV capsid variant), e.g., a plurality of particles, of the present disclosure may be used as a therapy for a cardiac disease or heart disease and/or method of improving (e.g., enhancing) cardiac function in a subject. In some embodiments, the cardiac disease is a cardiomyopathy (e.g., arrhythmogenic right ventricular cardiomyopathy, dilated cardiomyopathy, or hypertrophic cardiomyopathy), congestive heart failure, tachycardia (e.g., catecholaminergic polymorphic ventricular tachycardia), ischemic heart disease, and/or myocardial infarction.

[0870] In some embodiments, an AAV particle (e.g., an AAV particle comprising an AAV capsid variant), e.g., a plurality of particles, of the present disclosure may be used as a therapy for a disease associated with expression of HER2, e.g., a disease associated with overexpression of HER2. In some embodiments, the AAV particle of the disclosure (e.g., an AAV particle comprising an AAV capsid variant) is useful for the treatment, prophylaxis, palliation or amelioration of a HER2-positive cancer. In some embodiments, the HER2-positive cancer is a HER2-positive solid tumor. Additionally, or alternatively, the HER2-positive cancer may be a locally advanced or metastatic HER2-positive cancer. In some instances, the HER2-positive cancer is a HER2-positive breast cancer or a HER2-positive gastric cancer. In some embodiments, the HER2-positive cancer is selected from the group consisting of a HER2-positive gastroesophageal junction cancer, a HER2-positive colorectal cancer, a HER2-positive lung cancer (e.g., a HER2-positive non-small cell lung carcinoma), a HER2-positive pancreatic cancer, a HER2-positive colorectal cancer, a HER2-positive bladder cancer, a HER2-positive salivary duct cancer, a HER2-positive ovarian cancer (e.g., a HER2-positive epithelial ovarian cancer), or a HER2-positive endometrial cancer. In some instances, the HER2-positive cancer is prostate cancer. In some embodiments, the HER2-positive cancer has metastasized to the central nervous system (CNS). In some instances, the metastasized HER2-cancer has formed CNS neoplasms.

[0871] In some embodiments, an AAV particle (e.g., an AAV particle comprising an AAV capsid variant) e.g., a plurality of particles, of the present disclosure may be used as a therapy for a neuro-oncological disorder. In some embodiments, the neuro-oncological disorder is a cancer of primary CNS origin (e.g., a cancer of a CNS cell and/or CNS tissue). In some embodiments, the neuro-oncological disorder is metastatic cancer in a CNS cell, CNS region, and/or a CNS tissue. Examples of primary CNS cancers could be gliomas (which may include glioblastoma (also known as glioblastoma multiforme), astrocytomas, oligodendrogliomas, and ependymomas, and mixed gliomas), meningiomas, medulloblastomas, neuromas, and primary CNS lymphoma (in the brain, spinal cord, or meninges), among others. Examples of metastatic cancers include those originating in another tissue or organ, e.g., breast, lung, lymphoma, leukemia, melanoma (skin cancer), colon, kidney, prostate, or other types that metastasize to brain.

[0872] In some embodiments, administration of the AAV particle described herein (e.g., an AAV particle comprising an AAV capsid polypeptide, e.g., an AAV capsid variant) to a subject may increase target gene, mRNA, and/or protein levels in a subject, relative to a control, e.g., the gene, mRNA, and/or mRNA levels in the subject prior to receiving AAV particle. The target gene, mRNA, and/or protein levels may be increased by about 30%, 40%, 50%, 60%, 70%, 80%, 85%, 90%, 95% and 100%, or at least 20-30%, 20-40%, 20-50%, 20-60%, 20-70%, 20-80%, 20-90%, 20-95%, 20-100%, 30-40%, 30-50%, 30-60%, 30-70%, 30-80%, 30-90%, 30-95%, 30-100%, 40-50%, 40-60%, 40-70%, 40-80%, 40-90%, 40-95%, 40-100%, 50-60%, 50-70%, 50-80%, 50-90%, 50-95%, 50-100%, 60-70%, 60-80%, 60-90%, 60-95%, 60-100%, 70-80%, 70-90%, 70-95%, 70-100%, 80-90%, 80-95%, 80-100%, 90-95%, 90-100% or 95-100% in a subject such as, but not limited to, the CNS, a region of the CNS, or a specific cell of the CNS, or a muscle, a region of a muscle, or a cell of a muscle, of a subject. In some embodiments, cell of the CNS comprises an astrocyte, microglia, cortical neuron, hippocampal neuron, DRG and/or sympathetic neuron, sensory neuron, oligodendrocyte, motor neuron, or combination thereof. As a non-limiting example, the AAV particles may increase the gene, mRNA, and/or protein levels of a target protein by fold increases over baseline. In some embodiments, AAV particles lead to 5-6 times higher levels of a target gene, mRNA, or protein.

[0873] In some embodiments, administration of the AAV particle described herein (e.g., an AAV particle comprising an AAV capsid polypeptide, e.g., an AAV capsid variant), e.g., an AAV particle comprising a nucleic acid encoding a siRNA molecule, to a subject may decrease target gene, mRNA, and/or protein levels in a subject, relative to a control, e.g., the gene, mRNA, and/or mRNA levels in the subject prior to receiving AAV particle. The target gene, mRNA, and/or protein levels may be decreased by about 30%, 40%, 50%, 60%, 70%, 80%, 85%, 90%, 95% and 100%, or at least 20-30%, 20-40%, 20-50%, 20-60%, 20-70%, 20-80%, 20-90%, 20-95%, 20-100%, 30-40%, 30-50%, 30-60%, 30-70%, 30-80%, 30-90%, 30-95%, 30-100%, 40-50%, 40-60%, 40-70%, 40-80%, 40-90%, 40-95%, 40-100%, 50-60%, 50-70%, 50-80%, 50-90%, 50-95%, 50-100%, 60-70%, 60-80%, 60-90%, 60-95%, 60-100%, 70-80%, 70-90%, 70-95%, 70-100%, 80-90%, 80-95%, 80-100%, 90-95%, 90-100% or 95-100% in a subject such as, but not limited to, the CNS, a region of the CNS, or a specific cell of the CNS, or a muscle, a region of a muscle, or a cell of a muscle, of a subject. In some embodiments, cell of the CNS comprises an astrocyte, microglia, cortical neuron, hippocampal neuron, DRG and/or sympathetic neuron, sensory neuron, oligodendrocyte, motor neuron, or combination thereof. As a non-limiting example, the AAV particles may decrease the gene, mRNA, and/or protein levels of a target protein by fold decreases over baseline.

[0874] In some embodiments, the AAV particles of the present disclosure (e.g., an AAV particle comprising an AAV capsid polypeptide, e.g., an AAV capsid variant) may be used to increase target protein and reduce symptoms of neurological disease in a subject. In some embodiments, the AAV particles of the present disclosure (e.g., an AAV particle comprising an AAV capsid polypeptide, e.g., an AAV capsid variant) may be used to decrease target protein and reduce symptoms of neurological disease in a subject.

[0875] In some embodiments, the AAV particles of the present disclosure (e.g., an AAV particle comprising an AAV capsid polypeptide, e.g., an AAV capsid variant) may be used to reduce the decline of functional capacity and activities of daily living as measured by a standard evaluation system such as, but not limited to, the total functional capacity (TFC) scale.

[0876] In some embodiments, the AAV particles of the present disclosure (e.g., an AAV particle comprising an AAV capsid polypeptide, e.g., an AAV capsid variant) may be used to improve performance on any assessment used to measure symptoms of neurological disease. Such assessments include, but are not limited to ADAS-cog (Alzheimer Disease Assessment Scale-cognitive), MMSE (Mini-Mental State Examination), GDS (Geriatric Depression Scale), FAQ (Functional Activities Questionnaire), ADL (Activities of Daily Living), GPCOG (General Practitioner Assessment of Cognition), Mini-Cog, AMTS (Abbreviated Mental Test Score), Clock-drawing test, 6-CIT (6-item Cognitive Impairment Test), TYM (Test Your Memory), MoCa (Montreal Cognitive Assessment), ACE-R (Addenbrookes Cognitive Assessment), MIS (Memory Impairment Screen), BADLS (Bristol Activities of Daily Living Scale), Barthel Index, Functional Independence Measure, Instrumental Activities of Daily Living, IQCODE (Informant Questionnaire on Cognitive Decline in the Elderly), Neuropsychiatric Inventory, The Cohen-Mansfield Agitation Inventory, BEHAVE-AD, EuroQol, Short Form-36 and/or MBR Caregiver Strain Instrument, or any of the other tests as described in Sheehan B (Ther Adv Neurol Disord. 5 (6): 349-358 (2012)), the contents of which are herein incorporated by reference in their entirety.

[0877] In some embodiments, the present composition is administered as a solo therapeutic or as combination therapeutic for the treatment of a neurological disease/disorder or a neurodegenerative disorder, a muscular disorder or neuromuscular disorder, and/or a neuro-oncological disorder.

[0878] The AAV particles (e.g., an AAV particle comprising an AAV capsid variant) encoding the target protein may be used in combination with one or more other therapeutic agents. In some embodiments, compositions can be administered concurrently with, prior to, or subsequent to, additional therapeutic or medical procedures. In general, each agent will be administered at a dose and/or on a time schedule determined for that agent.

[0879] Therapeutic agents that may be used in combination with the AAV particles of the present disclosure (e.g., an AAV particle comprising an AAV capsid variant) can be small molecule compounds which are antioxidants, anti-inflammatory agents, anti-apoptosis agents, calcium regulators, anti-glutamatergic agents, structural protein inhibitors, compounds involved in muscle function, and compounds involved in metal ion regulation. As a non-limiting example, the combination therapy may be in combination with one or more neuroprotective agents such as small molecule compounds, growth factors and hormones which have been tested for their neuroprotective effect on motor neuron degeneration.

[0880] Compounds tested for treating neurological disease which may be used in combination with the AAV particles described herein include, but are not limited to, cholinesterase inhibitors (donepezil, rivastigmine, galantamine), NMDA receptor antagonists such as memantine, anti-psychotics, anti-depressants, anti-convulsants (e.g., sodium valproate and levetiracetam for myoclonus), secretase inhibitors, amyloid aggregation inhibitors, copper or zinc modulators, BACE inhibitors, inhibitors of tau aggregation, such as Methylene blue, phenothiazines, anthraquinones, n-phenylamines or rhodamines, microtubule stabilizers such as NAP, taxol or paclitaxel, kinase or phosphatase inhibitors such as those targeting GSK3β (lithium) or PP2A, immunization with Aβ peptides or tau phospho-epitopes, anti-tau or anti-amyloid antibodies, dopamine-depleting agents (e.g., tetrabenazine for chorea), benzodiazepines (e.g., clonazepam for myoclonus, chorea, dystonia, rigidity, and/or spasticity), amino acid precursors of dopamine (e.g., levodopa for rigidity), skeletal muscle relaxants (e.g., baclofen, tizanidine for rigidity and/or spasticity), inhibitors for acetylcholine release at the neuromuscular junction to cause muscle paralysis (e.g., botulinum toxin for bruxism and/or dystonia), atypical neuroleptics (e.g., olanzapine and quetiapine for psychosis and/or irritability, risperidone, sulpiride and haloperidol for psychosis, chorea and/or irritability, clozapine for treatment-resistant psychosis, aripiprazole for psychosis with prominent negative symptoms), selective serotonin reuptake inhibitors (SSRIs) (e.g., citalopram, fluoxetine, paroxetine, sertraline, mirtazapine, venlafaxine for depression, anxiety, obsessive compulsive behavior and/or irritability), hypnotics (e.g., xopiclone and/or zolpidem for altered sleep-wake cycle), anticonvulsants (e.g., sodium valproate and carbamazepine for mania or hypomania) and mood stabilizers (e.g., lithium for mania or hypomania).

[0881] Neurotrophic factors may be used in combination therapy with the AAV particles of the present disclosure (e.g., an AAV particle comprising an AAV capsid variant) for treating neurological disease. Generally, a neurotrophic factor is defined as a substance that promotes survival, growth, differentiation, proliferation and/or maturation of a neuron, or stimulates increased activity of a neuron. In some embodiments, the present methods further comprise delivery of one or more trophic factors into the subject in need of treatment. Trophic factors may include, but are not limited to, IGF-I, GDNF, BDNF, CTNF, VEGF, Colivelin, Xaliproden, Thyrotrophin-releasing hormone and ADNF, and variants thereof.

[0882] In one aspect, the AAV particle described herein (e.g., an AAV particle comprising an AAV capsid variant) may be co-administered with AAV particles expressing neurotrophic factors such as AAV-IGF-I (See e.g., Vincent et al., Neuromolecular medicine, 2004, 6, 79-85; the contents of which are incorporated herein by reference in their entirety) and AAV-GDNF (See e.g., Wang et al., J Neurosci., 2002, 22, 6920-6928; the contents of which are incorporated herein by reference in their entirety).

[0883] In some embodiments, administration of the AAV particles (e.g., an AAV particle comprising an AAV capsid variant) to a subject will modulate, e.g., increase or decrease, the expression of a target protein in a subject and the modulation, e.g., increase or decrease of the presence, level, activity, and/or expression of the target protein will reduce the effects and/or symptoms of a neurological disease/disorder or a neurodegenerative disorder, a muscular disorder or neuromuscular disorder, and/or a neuro-oncological disorder in a subject.

### Definitions

[0884] Unless defined otherwise, all technical and scientific terms used herein have the same meaning as commonly understood by one of ordinary skill in the art to which the invention pertains.

[0885] Articles such as “a.” “an,” and “the” may mean one or more than one unless indicated to the contrary or otherwise evident from the context. Claims or descriptions that include “or” between one or more members of a group are considered satisfied if one, more than one, or all of the group members are present in, employed in, or otherwise relevant to a given product or process unless indicated to the contrary or otherwise evident from the context. The disclosure includes embodiments in which exactly one member of the group is present in, employed in, or otherwise relevant to a given product or process. The disclosure includes embodiments in which more than one, or the entire group members are present in, employed in, or otherwise relevant to a given product or process.

[0886] It is also noted that the term “comprising” is intended to be open and permits but does not require the inclusion of additional elements or steps. When the term “comprising” is used herein, the term “consisting of” and “consisting essentially thereof” is thus also encompassed and disclosed.

[0887] Where ranges are given, endpoints are included. Furthermore, it is to be understood that unless otherwise indicated or otherwise evident from the context and understanding of one of ordinary skill in the art, values that are expressed as ranges can assume any specific value or subrange within the stated ranges in different embodiments of the disclosure, to the tenth of the unit of the lower limit of the range, unless the context clearly dictates otherwise.

[0888] Adeno-associated virus: As used herein, the term “adeno-associated virus” or “AAV” refers to members of the dependovirus genus or a variant, e.g., a functional variant, thereof. In some embodiments, the AAV is wildtype, or naturally occurring. In some embodiments, the AAV is recombinant.

[0889] AAV Particle: As used herein, an “AAV particle” refers to a particle or a virion comprising an AAV capsid, e.g., an AAV capsid variant, and a polynucleotide, e.g., a viral genome or a vector genome. In some embodiments, the viral genome of the AAV particle comprises at least one payload region and at least one ITR, In some embodiments, an AAV particle of the disclosure is an AAV particle comprising an AAV variant. In some embodiments, the AAV particle is capable of delivering a nucleic acid, e.g., a payload region, encoding a payload to cells, typically, mammalian, e.g., human, cells. In some embodiments, an AAV particle of the present disclosure may be produced recombinantly. In some embodiments, an AAV particle may be derived from any serotype, described herein or known in the art, including combinations of serotypes (e.g., “pseudotyped” AAV) or from various genomes (e.g., single stranded or self-complementary). In some embodiments, the AAV particle may be replication defective and/or targeted. It is to be understood that reference to the AAV particle of the disclosure also includes pharmaceutical compositions thereof, even if not explicitly recited.

[0890] Administering: As used herein, the term “administering” refers to providing a pharmaceutical agent or composition to a subject.

[0891] Amelioration: As used herein, the term “amelioration” or “ameliorating” refers to a lessening of severity of at least one indicator of a condition or disease. For example, in the context of neurodegeneration disorder, amelioration includes the reduction of neuron loss.

[0892] Amplicon: As used herein, “amplicon” may refer to any piece of RNA or DNA formed as the product of amplification events, e.g. PCR, In some embodiments, full-length capsid amplicons may be used as templates for next generation sequencing (NGS) library generation. Full-length capsid amplicons may be used for cloning into a DNA library for any number of additional rounds of AAV selection as described herein.

[0893] Animal: As used herein, the term “animal” refers to any member of the animal kingdom. In some embodiments, “animal” refers to humans at any stage of development. In some embodiments, “animal” refers to non-human animals at any stage of development. In certain embodiments, the non-human animal is a mammal (e.g., a rodent, a mouse, a rat, a rabbit, a monkey, a dog, a cat, a sheep, cattle, a primate, or a pig). In some embodiments, animals include, but are not limited to, mammals, birds, reptiles, amphibians, fish, and worms. In some embodiments, the animal is a transgenic animal, genetically engineered animal, or a clone.

[0894] Antisense strand: As used herein, the term “the antisense strand” or “the first strand” or “the guide strand” of a siRNA molecule refers to a strand that is substantially complementary to a section of about 10-50 nucleotides, e.g., about 15-30, 16-25, 18-23 or 19-22 nucleotides of the mRNA of a gene targeted for silencing. The antisense strand or first strand has sequence sufficiently complementary to the desired target mRNA sequence to direct target-specific silencing, e.g., complementarity sufficient to trigger the destruction of the desired target mRNA by the RNAi machinery or process.

[0895] Approximately: As used herein, the term “approximately” or “about.” as applied to one or more values of interest, refers to a value that is similar to a stated reference value. In certain embodiments, the term “approximately” or “about” refers to a range of values that fall within 25%, 20%, 19%, 18%, 17%, 16%, 15%, 14%, 13%, 12%, 11%, 10%, 9%, 8%, 7%, 6%, 5%, 4%, 3%, 2%, 1%, or less in either direction (greater than or less than) of the stated reference value unless otherwise stated or otherwise evident from the context (except where such number would exceed 100% of a possible value).

[0896] Biopanning: As used herein, the term “biopanning” refers to an AAV capsid library selection process comprising administration of an AAV particle with enhanced tissue- and/or cell type-specific transduction to a cell and/or subject; extraction of nucleotides encoded by said AAV particle from said transduced tissue- and/or cell type-specific; and, use of the extracted nucleotides for cloning into a nucleotide library for the generation of AAV particles for subsequent rounds of the same.

[0897] Capsid: As used herein, the term “capsid” refers to the exterior, e.g., a protein shell, of a virus particle, e.g., an AAV particle, that is substantially (e.g., >50%, >60%, >70%, >80%, >90%, >95%, >99%, or 100%) protein. In some embodiments, the capsid is an AAV capsid comprising an AAV capsid protein described herein, e.g., a VP1, VP2, and/or VP3 polypeptide. The AAV capsid protein can be a wild-type AAV capsid protein or a variant, e.g., a structural and/or functional variant from a wild-type or a reference capsid protein, referred to herein as an “AAV capsid variant.” In some embodiments, the AAV capsid variant described herein has the ability to enclose, e.g., encapsulate, a viral genome and/or is capable of entry into a cell, e.g., a mammalian cell. In some embodiments, the AAV capsid variant described herein may have modified tropism compared to that of a wild-type AAV capsid, e.g., the corresponding wild-type capsid.

[0898] Complementary and substantially complementary: As used herein, the term “complementary” refers to the ability of polynucleotides to form base pairs with one another. Base pairs are typically formed by hydrogen bonds between nucleotide units in antiparallel polynucleotide strands. Complementary polynucleotide strands can form base pairs in the Watson-Crick manner (e.g., A to T, A to U. C to G), or in any other manner that allows for the formation of duplexes. As persons skilled in the art are aware, when using RNA as opposed to DNA, uracil rather than thymine is the base that is considered to be complementary to adenine. However, when a U is denoted in the context of the present disclosure, the ability to substitute a T is implied, unless otherwise stated. Perfect complementarity or 100% complementarity refers to the situation in which each nucleotide unit of one polynucleotide strand can form a hydrogen bond with a nucleotide unit of a second polynucleotide strand. Less than perfect complementarity refers to the situation in which some, but not all, nucleotide units of two strands can form hydrogen bond with each other. For example, for two 20-mers, if only two base pairs on each strand can form a hydrogen bond with each other, the polynucleotide strands exhibit 10% complementarity. In the same example, if 18 base pairs on each strand can form hydrogen bonds with each other, the polynucleotide strands exhibit 90% complementarity. The term “complementary” as used herein can encompass fully complementary, partially complementary, or substantially complementary. As used herein, the term “substantially complementary” means that the siRNA has a sequence (e.g., in the antisense strand) which is sufficient to bind the desired target mRNA, and to trigger the RNA silencing of the target mRNA. “Fully complementary”, “perfect complementarity”, or “100% complementarity” refers to the situation in which each nucleotide unit of one polynucleotide or oligonucleotide strand can base-pair with a nucleotide unit of a second polynucleotide or oligonucleotide strand.

[0899] Control Elements: As used herein, “control elements”, “regulatory control elements” or “regulatory sequences” refers to promoter regions, polyadenylation signals, transcription termination sequences, upstream regulatory domains, origins of replication, internal ribosome entry sites (“IRES”), enhancers, and the like, which provide for the replication, transcription and translation of a coding sequence in a recipient cell. Not all of these control elements need always be present as long as the selected coding sequence is capable of being replicated, transcribed and/or translated in an appropriate host cell.

[0900] Delivery: As used herein. “delivery” refers to the act or manner of delivering an AAV particle, a compound, substance, entity, moiety, cargo or payload.

[0901] Element: As used herein, the term “element” refers to a distinct portion of an entity. In some embodiments, an element may be a polynucleotide sequence with a specific purpose, incorporated into a longer polynucleotide sequence.

[0902] Encapsulate: As used herein, the term “encapsulate” means to enclose, surround or encase. As an example, a capsid protein, e.g., an AAV capsid variant, often encapsulates a viral genome. In some embodiments, encapsulate within a capsid, e.g., an AAV capsid variant, encompasses 100% coverage by a capsid, as well as less than 100% coverage, e.g., 95%, 90%, 85%, 80%, 70%, 60% or less. For example, gaps or discontinuities may be present in the capsid so long as the viral genome is retained in the capsid, e.g., prior to entry into a cell.

[0903] Effective Amount: As used herein, the term “effective amount” of an agent is that amount sufficient to effect beneficial or desired results, for example, clinical results, and, as such, an “effective amount” depends upon the context in which it is being applied. For example, in the context of administering an agent that treats cancer, an effective amount of an agent is, for example, an amount sufficient to achieve treatment, as defined herein, of cancer, as compared to the response obtained without administration of the agent.

[0904] Expression: As used herein. “expression” of a nucleic acid sequence refers to one or more of the following events: (1) production of an RNA template from a DNA sequence (e.g., by transcription); (2) processing of an RNA transcript (e.g., by splicing, editing, 5′ cap formation, and/or 3′ end processing); (3) translation of an RNA into a polypeptide or protein; and (4) post-translational modification of a polypeptide or protein.

[0905] Formulation: As used herein, a “formulation” includes at least one AAV particle (active ingredient) and an excipient, and/or an inactive ingredient.

[0906] Fragment: A “fragment.” as used herein, refers to a portion. For example, an antibody fragment may comprise a CDR, or a heavy chain variable region, or a scFv, etc.

[0907] Homology: As used herein, the term “homology” refers to the overall relatedness between polymeric molecules, e.g. between polynucleotide molecules (e.g. DNA molecules and/or RNA molecules) and/or between polypeptide molecules. In some embodiments, polymeric molecules are considered to be “homologous” to one another if their sequences are at least 25%, 30%, 35%, 40%, 45%, 50%, 55%, 60%, 65%, 70%, 75%, 80%, 85%, 90%, 95%, or 99% identical or similar. The term “homologous” necessarily refers to a comparison between at least two sequences (polynucleotide or polypeptide sequences). In accordance with the disclosure, two polynucleotide sequences are considered to be homologous if the polypeptides they encode are at least about 50%, 60%, 70%, 80%, 90%, 95%, or even 99% for at least one stretch of at least about 20 amino acids. In some embodiments, homologous polynucleotide sequences are characterized by the ability to encode a stretch of at least 4-5 uniquely specified amino acids. For polynucleotide sequences less than 60 nucleotides in length, homology is determined by the ability to encode a stretch of at least 4-5 uniquely specified amino acids. In accordance with the disclosure, two protein sequences are considered to be homologous if the proteins are at least about 50%, 60%, 70%, 80%, or 90% identical for at least one stretch of at least about 20 amino acids.

[0908] Identity: As used herein, the term “identity” refers to the overall relatedness between polymeric molecules, e.g., between polynucleotide molecules (e.g. DNA molecules and/or RNA molecules) and/or between polypeptide molecules. Calculation of the percent identity of two polynucleotide sequences, for example, can be performed by aligning the two sequences for optimal comparison purposes (e.g., gaps can be introduced in one or both of a first and a second nucleic acid sequences for optimal alignment and non-identical sequences can be disregarded for comparison purposes). In certain embodiments, the length of a sequence aligned for comparison purposes is at least 30%, at least 40%, at least 50%, at least 60%, at least 70%, at least 80%, at least 90%, at least 95%, or 100% of the length of the reference sequence. The nucleotides at corresponding nucleotide positions are then compared. When a position in the first sequence is occupied by the same nucleotide as the corresponding position in the second sequence, then the molecules are identical at that position. The percent identity between the two sequences is a function of the number of identical positions shared by the sequences, taking into account the number of gaps, and the length of each gap, which needs to be introduced for optimal alignment of the two sequences. The comparison of sequences and determination of percent identity between two sequences can be accomplished using a mathematical algorithm. For example, the percent identity between two nucleotide sequences can be determined using methods such as those described in Computational Molecular Biology, Lesk, A, M, cd., Oxford University Press, New York, 1988; Biocomputing: Informatics and Genome Projects, Smith, D, W., ed., Academic Press, New York, 1993; Sequence Analysis in Molecular Biology, von Heinje, G., Academic Press, 1987; Computer Analysis of Sequence Data, Part I, Griffin, A, M, and Griffin, H. G., cds., Humana Press, New Jersey, 1994; and Sequence Analysis Primer, Gribskov, M, and Devereux, J., eds., M Stockton Press, New York, 1991; the contents of each of which are incorporated herein by reference in their entirety. For example, the percent identity between two nucleotide sequences can be determined using the algorithm of Meyers and Miller (CABIOS, 1989, 4:11-17), which has been incorporated into the ALIGN program (version 2.0) using a PAM120 weight residue table, a gap length penalty of 12 and a gap penalty of 4. The percent identity between two nucleotide sequences can, alternatively, be determined using the GAP program in the GCG software package using an NWSgapdna.CMP matrix. Methods commonly employed to determine percent identity between sequences include, but are not limited to those disclosed in Carillo, H., and Lipman, D., SIAM J Applied Math., 48:1073 (1988); incorporated herein by reference. Techniques for determining identity are codified in publicly available computer programs. Exemplary computer software to determine homology between two sequences include, but are not limited to, GCG program package, Devereux, J., et al., Nucleic Acids Research, 12 (1), 387 (1984)), BLASTP, BLASTN, and FASTA Altschul, S, F. et al., J. Molec. Biol., 215, 403 (1990)).

[0909] Inhibit expression of a gene: As used herein, the phrase “inhibit expression of a gene” means to cause a reduction in the amount of an expression product of the gene. The expression product can be an RNA transcribed from the gene (e.g., an mRNA) or a polypeptide translated from an mRNA transcribed from the gene. Typically, a reduction in the level of an mRNA results in a reduction in the level of a polypeptide translated therefrom. The level of expression may be determined using standard techniques for measuring mRNA or protein.

[0910] Inverted terminal repeat: As used herein, the term “inverted terminal repeat” or “ITR” refers to a cis-regulatory element for the packaging of polynucleotide sequences into viral capsids.

[0911] Isolated: As used herein, the term “isolated” refers to a substance or entity that is altered or removed from the natural state, e.g., altered or removed from at least some of component with which it is associated in the natural state. For example, a nucleic acid or a peptide naturally present in a living animal is not “isolated.” but the same nucleic acid or peptide partially or completely separated from the coexisting materials of its natural state is “isolated.” An isolated nucleic acid or protein can exist in substantially purified form, or can exist in a non-native environment such as, for example, a host cell. Such polynucleotides could be part of a vector and/or such polynucleotides or polypeptides could be part of a composition, and still be isolated in that such vector or composition is not part of the environment in which it is found in nature. In some embodiments, an isolated nucleic acid is recombinant, e.g., incorporated into a vector.

[0912] Library: As used herein, the term “library” refers to a diverse collection of linear polypeptides, polynucleotides, viral particles, or viral vectors. As examples, a library may be a DNA library or an AAV capsid library.

[0913] Molecular scaffold: As used herein a “molecular scaffold” is a framework or starting molecule that forms the sequence or structural basis against which to design or make a subsequent molecule.

[0914] Neurological disease: As used herein, a “neurological disease” is any disease associated with the central or peripheral nervous system and components thereof (e.g., neurons).

[0915] Orthogonal evolution: As used herein, the term “orthogonal evolution” refers to a method wherein AAV particles are administered for a first round of AAV selection as described herein across a set of any number of cell- and/or subject-types that may be from different species and/or strains, and wherein any number of additional, i.e., subsequent, AAV selection rounds are performed either across a set of any number of cell- and/or subject-types that may be from different species and/or strains, or across a set of any number of cell- and/or subject-types that may be from the same species and/or strain.

[0916] Open reading frame: As used herein, “open reading frame” or “ORF” refers to a sequence which does not contain a stop codon in a given reading frame.

[0917] Particle: As used herein, a “particle” is a virus comprised of at least two components, a protein capsid and a polynucleotide sequence enclosed within the capsid.

[0918] Payload region: As used herein, a “payload region” is any nucleic acid sequence (e.g., within the viral genome) which encodes one or more “payloads” of the disclosure. As non-limiting examples, a payload region may be a nucleic acid sequence within the viral genome of an AAV particle, which encodes a payload, wherein the payload is an RNAi agent or a polypeptide. Payloads of the present disclosure may be, but are not limited to, peptides, polypeptides, proteins, antibodies, RNAi agents, etc.

[0919] Polypeptide: As used herein, “polypeptide” means a polymer of amino acid residues (natural or unnatural) linked together most often by peptide bonds. The term, as used herein, refers to proteins, polypeptides, and peptides of any size, structure, or function. In some instances, the polypeptide encoded is smaller than about 50 amino acids and the polypeptide is then termed a peptide. If the polypeptide is a peptide, it will be at least about 2, 3, 4, or at least 5 amino acid residues long. Thus, polypeptides include gene products, naturally occurring polypeptides, synthetic polypeptides, homologs, orthologs, paralogs, fragments and other equivalents, variants, and analogs of the foregoing. A polypeptide may be a single molecule or may be a multi-molecular complex such as a dimer, trimer or tetramer. They may also comprise single chain or multichain polypeptides and may be associated or linked. The term polypeptide may also apply to amino acid polymers in which one or more amino acid residues are an artificial chemical analogue of a corresponding naturally occurring amino acid.

[0920] Polypeptide variant: The term “polypeptide variant” refers to molecules which differ in their amino acid sequence from a native or reference sequence. The amino acid sequence variants may possess substitutions, deletions, and/or insertions at certain positions within the amino acid sequence, as compared to a native or reference sequence. In some embodiments, a variant comprises a sequence having at least about 50%, at least about 80%, or at least about 90%, identical (homologous) to a native or a reference sequence.

[0921] Peptide: As used herein, “peptide” is less than or equal to 50 amino acids long, e.g., about 5, 10, 15, 20, 25, 30, 35, 40, 45, or 50 amino acids long.

[0922] Pharmaceutically acceptable: The phrase “pharmaceutically acceptable” is employed herein to refer to those compounds, materials, compositions, and/or dosage forms which are, within the scope of sound medical judgment, suitable for use in contact with the tissues of human beings and animals without excessive toxicity, irritation, allergic response, or other problem or complication, commensurate with a reasonable benefit/risk ratio.

[0923] Preventing: As used herein, the term “preventing” or “prevention” refers to partially or completely delaying onset of an infection, disease, disorder and/or condition; partially or completely delaying onset of one or more symptoms, features, or clinical manifestations of a particular infection, disease, disorder, and/or condition; partially or completely delaying onset of one or more symptoms, features, or manifestations of a particular infection, disease, disorder, and/or condition; partially or completely delaying progression from an infection, a particular disease, disorder and/or condition; and/or decreasing the risk of developing pathology associated with the infection, the disease, disorder, and/or condition.

[0924] Prophylactic: As used herein, “prophylactic” refers to a therapeutic or course of action used to prevent the spread of disease.

[0925] Prophylaxis: As used herein, a “prophylaxis” refers to a measure taken to maintain health and prevent the spread of disease.

[0926] Region: As used herein, the term “region” refers to a zone or general area. In some embodiments, when referring to a protein or protein module, a region may comprise a linear sequence of amino acids along the protein or protein module or may comprise a three-dimensional area, an epitope and/or a cluster of epitopes. In some embodiments, regions comprise terminal regions. As used herein, the term “terminal region” refers to regions located at the ends or termini of a given agent. When referring to proteins, terminal regions may comprise N- and/or C-termini.

[0927] In some embodiments, when referring to a polynucleotide, a region may comprise a linear sequence of nucleic acids along the polynucleotide or may comprise a three-dimensional area, secondary structure, or tertiary structure. In some embodiments, regions comprise terminal regions. As used herein, the term “terminal region” refers to regions located at the ends or termini of a given agent. When referring to polynucleotides, terminal regions may comprise 5′ and/or 3′ termini.

[0928] RNA or RNA molecule: As used herein, the term “RNA” or “RNA molecule” or “ribonucleic acid molecule” refers to a polymer of ribonucleotides; the term “DNA” or “DNA molecule” or “deoxyribonucleic acid molecule” refers to a polymer of deoxyribonucleotides. DNA and RNA can be synthesized naturally, e.g., by DNA replication and transcription of DNA, respectively; or be chemically synthesized. DNA and RNA can be single-stranded (i.e., ssRNA or ssDNA, respectively) or multi-stranded (e.g., double stranded, i.e., dsRNA and dsDNA, respectively). The term “mRNA” or “messenger RNA”, as used herein, refers to a single stranded RNA that encodes the amino acid sequence of one or more polypeptide chains.

[0929] RNA interfering or RNAi: As used herein, the term “RNA interfering” or “RNAi” refers to a sequence specific regulatory mechanism mediated by RNA molecules which results in the inhibition or interfering or “silencing” of the expression of a corresponding protein-coding gene. RNAi has been observed in many types of organisms, including plants, animals and fungi. RNAi occurs in cells naturally to remove foreign RNAs (e.g., viral RNAs). Natural RNAi proceeds via fragments cleaved from free dsRNA which direct the degradative mechanism to other similar RNA sequences. RNAi is controlled by the RNA-induced silencing complex (RISC) and is initiated by short/small dsRNA molecules in cell cytoplasm, where they interact with the catalytic RISC component argonaute. The dsRNA molecules can be introduced into cells exogenously. Exogenous dsRNA initiates RNAi by activating the ribonuclease protein Dicer, which binds and cleaves dsRNAs to produce double-stranded fragments of 21-25 base pairs with a few unpaired overhang bases on each end. These short double stranded fragments are called small interfering RNAs (siRNAs).

[0930] RNAi agent: As used herein, the term “RNAi agent” refers to an RNA molecule, or its derivative, that can induce inhibition, interfering, or “silencing” of the expression of a target gene and/or its protein product. An RNAi agent may knock-out (virtually eliminate or eliminate) expression, or knock-down (lessen or decrease) expression. The RNAi agent may be, but is not limited to, dsRNA, siRNA, shRNA, pre-miRNA, pri-miRNA, miRNA, stRNA, lncRNA, piRNA, or snoRNA.

[0931] miR binding site: As used herein, a “miR binding site” comprises a nucleic acid sequence (whether RNA or DNA, e.g., differ by “U” of RNA or “T” in DNA) that is capable of binding, or binds, in whole or in part to a microRNA (miR) through complete or partial hybridization. Typically, such binding occurs between the miR and the miR binding site in the reverse complement orientation. In some embodiments, the miR binding site is transcribed from the AAV vector genome encoding the miR binding site.

[0932] In some embodiments, a miR binding site may be encoded or transcribed in series. Such a “miR binding site series” or “miR BSs” may include two or more miR binding sites having the same or different nucleic acid sequence.

[0933] Spacer: As used here, a “spacer” is generally any selected nucleic acid sequence of, e.g., 1, 2, 3, 4, 5, 6, 7, 8, 9, or 10 nucleotides in length, which is located between two or more consecutive miR binding site sequences. Spacers may also be more than 10 nucleotides in length, e.g., 20, 30, 40, or 50 or more than 50 nucleotides.

[0934] Sample: As used herein, the term “sample” or “biological sample” refers to a subset of its tissues, cells, nucleic acids, or component parts (e.g. body fluids, including but not limited to blood, serum, mucus, lymphatic fluid, synovial fluid, cerebrospinal fluid, saliva, amniotic fluid, amniotic cord blood, urine, vaginal fluid and semen).

[0935] Self-complementary viral particle: As used herein, a “self-complementary viral particle” is a particle comprised of at least two components, a protein capsid and a self-complementary viral genome enclosed within the capsid.

[0936] Sense Strand: As used herein, the term “the sense strand” or “the second strand” or “the passenger strand” of a siRNA molecule refers to a strand that is complementary to the antisense strand or first strand. The antisense and sense strands of a siRNA molecule are hybridized to form a duplex structure. As used herein, a “siRNA duplex” includes a siRNA strand having sufficient complementarity to a section of about 10-50 nucleotides of the mRNA of the gene targeted for silencing and a siRNA strand having sufficient complementarity to form a duplex with the other siRNA strand.

[0937] Similarity: As used herein, the term “similarity” refers to the overall relatedness between polymeric molecules, e.g. between polynucleotide molecules (e.g. DNA molecules and/or RNA molecules) and/or between polypeptide molecules. Calculation of percent similarity of polymeric molecules to one another can be performed in the same manner as a calculation of percent identity, except that calculation of percent similarity takes into account conservative substitutions as is understood in the art.

[0938] Short interfering RNA or siRNA: As used herein, the terms “short interfering RNA,” “small interfering RNA” or “siRNA” refer to an RNA molecule (or RNA analog) comprising between about 5-60 nucleotides (or nucleotide analogs) which is capable of directing or mediating RNAi. Preferably, a siRNA molecule comprises between about 15-30 nucleotides or nucleotide analogs, such as between about 16-25 nucleotides (or nucleotide analogs), between about 18-23 nucleotides (or nucleotide analogs), between about 19-22 nucleotides (or nucleotide analogs) (e.g., 19, 20, 21 or 22 nucleotides or nucleotide analogs), between about 19-25 nucleotides (or nucleotide analogs), and between about 19-24 nucleotides (or nucleotide analogs). The term “short” siRNA refers to a siRNA comprising 5-23 nucleotides, preferably 21 nucleotides (or nucleotide analogs), for example, 19, 20, 21 or 22 nucleotides. The term “long” siRNA refers to a siRNA comprising 24-60 nucleotides, preferably about 24-25 nucleotides, for example, 23, 24, 25 or 26 nucleotides. Short siRNAs may, in some instances, include fewer than 19 nucleotides, e.g., 16, 17 or 18 nucleotides, or as few as 5 nucleotides, provided that the shorter siRNA retains the ability to mediate RNAi. Likewise, long siRNAs may, in some instances, include more than 26 nucleotides, e.g., 27, 28, 29, 30, 35, 40, 45, 50, 55, or even 60 nucleotides, provided that the longer siRNA retains the ability to mediate RNAi or translational repression absent further processing, e.g., enzymatic processing, to a short siRNA, siRNAs can be single stranded RNA molecules (ss-siRNAs) or double stranded RNA molecules (ds-siRNAs) comprising a sense strand and an antisense strand which hybridized to form a duplex structure called an siRNA duplex.

[0939] Subject: As used herein, the term “subject” or “patient” refers to any organism to which a composition in accordance with the disclosure may be administered, e.g., for experimental, diagnostic, prophylactic, and/or therapeutic purposes. Typical subjects include animals (e.g., mammals such as mice, rats, rabbits, non-human primates, and humans) and/or plants.

[0940] Substantially: As used herein, the term “substantially” refers to the qualitative condition of exhibiting total or near-total extent or degree of a characteristic or property of interest. One of ordinary skill in the biological arts will understand that biological and chemical phenomena rarely, if ever, go to completion and/or proceed to completeness or achieve or avoid an absolute result. The term “substantially” is therefore used herein to capture the potential lack of completeness inherent in many biological and chemical phenomena.

[0941] Target Cells: As used herein, “target cells” or “target tissue” refers to any one or more cells of interest. The cells may be found in vitro, in vivo, in situ or in the tissue or organ of an organism. The organism may be an animal, preferably a mammal, more preferably a human and most preferably a patient.

[0942] Therapeutic Agent: The term “therapeutic agent” refers to any agent that, when administered to a subject, has a therapeutic, diagnostic, and/or prophylactic effect and/or elicits a desired biological and/or pharmacological effect.

[0943] Therapeutically effective amount: As used herein, the term “therapeutically effective amount” means an amount of an agent to be delivered (e.g., nucleic acid, drug, therapeutic agent, diagnostic agent, prophylactic agent, etc.) that is sufficient, when administered to a subject suffering from or susceptible to an infection, disease, disorder, and/or condition, to treat, improve symptoms of, diagnose, prevent, and/or delay the onset of the infection, disease, disorder, and/or condition. In some embodiments, a therapeutically effective amount is provided in a single dose.

[0944] Therapeutically effective outcome: As used herein, the term “therapeutically effective outcome” means an outcome that is sufficient in a subject suffering from or susceptible to an infection, disease, disorder, and/or condition, to treat, improve symptoms of, diagnose, prevent, and/or delay the onset of the infection, disease, disorder, and/or condition.

[0945] Treating: As used herein, the term “treating” refers to partially or completely alleviating, ameliorating, improving, relieving, delaying onset of, inhibiting progression of, reducing severity of, and/or reducing incidence of one or more symptoms or features of a particular infection, disease, disorder, and/or condition. For example, “treating” cancer may refer to inhibiting survival, growth, and/or spread of a tumor. Treatment may be administered to a subject who does not exhibit signs of a disease, disorder, and/or condition and/or to a subject who exhibits only early signs of a disease, disorder, and/or condition for the purpose of decreasing the risk of developing pathology associated with the disease, disorder, and/or condition.

[0946] Conservative amino acid substitution: As used herein, a “conservative amino acid substitution” is one in which the amino acid residue is replaced with an amino acid residue having a similar side chain. Families of amino acid residues having similar side chains have been defined in the art. These families include amino acids with basic side chains (e.g., lysine, arginine, histidine), acidic side chains (e.g., aspartic acid, glutamic acid), uncharged polar side chains (e.g., glycine, asparagine, glutamine, serine, threonine, tyrosine, cysteine), nonpolar side chains (e.g., alanine, valine, leucine, isoleucine, proline, phenylalanine, methionine, tryptophan), beta-branched side chains (e.g., threonine, valine, isoleucine) and aromatic side chains (e.g., tyrosine, phenylalanine, tryptophan, histidine).

[0947] Variant: As used herein, the term “variant” refers to a polypeptide or polynucleotide that has an amino acid or a nucleotide sequence that is substantially identical, e.g., having at least 70%, 75%, 80%, 85%, 90%, 95%, or 99% sequence identity to a reference sequence. In some embodiments, the variant is a functional variant.

[0948] Functional Variant: As used herein, the term “functional variant” refers to a polypeptide variant or a polynucleotide variant that has at least one activity of the reference sequence.

[0949] Insertional Variant: “Insertional variants” when referring to polypeptides are those with one or more amino acids inserted, e.g., immediately adjacent or subsequent, to a position in an amino acid sequence. “Immediately adjacent” or “immediately subsequent” to an amino acid means connected to either the alpha-carboxy or alpha-amino functional group of the amino acid.

[0950] Deletional Variant: “Deletional variants” when referring to polypeptides, are those with one or more amino acids in deleted from a reference protein.

[0951] Vector: As used herein, the term “vector” refers to any molecule or moiety which transports, transduces or otherwise acts as a carrier of a heterologous molecule. In some embodiments, vectors may be plasmids. In some embodiments, vectors may be viruses. An AAV particle is an example of a vector. Vectors of the present disclosure may be produced recombinantly and may be based on and/or may comprise adeno-associated virus (AAV) parent or reference sequences. The heterologous molecule may be a polynucleotide and/or a polypeptide.

[0952] Viral Genome: As used herein, the terms “viral genome” or “vector genome” refer to the nucleic acid sequence(s) encapsulated in an AAV particle. A viral genome comprises a nucleic acid sequence with at least one payload region encoding a payload and at least one ITR.

### Equivalents and Scope

[0953] The disclosures of each and every patent, patent application, and publication cited herein are hereby incorporated herein by reference in their entirety. Those skilled in the art will recognize or be able to ascertain using no more than routine experimentation, many equivalents to the specific embodiments in accordance with the disclosure described herein. The scope of the present disclosure is not intended to be limited to the above Description, but rather is as set forth in the appended claims.

[0954] In addition, it is to be understood that any particular embodiment of the present disclosure that falls within the prior art may be explicitly excluded from any one or more of the claims. Since such embodiments are deemed to be known to one of ordinary skill in the art, they may be excluded even if the exclusion is not set forth explicitly herein. Any particular embodiment of the compositions of the disclosure (e.g., any antibiotic, therapeutic or active ingredient; any method of production; any method of use; etc.) can be excluded from any one or more claims, for any reason, whether or not related to the existence of prior art.

[0955] It is to be understood that the words which have been used are words of description rather than limitation, and that changes may be made within the purview of the appended claims without departing from the true scope and spirit of the disclosure in its broader aspects.

[0956] While the present disclosure has been described at some length and with some particularity with respect to the several described embodiments, it is not intended that it should be limited to any such particulars or embodiments or any particular embodiment, but it is to be construed with references to the appended claims so as to provide the broadest possible interpretation of such claims in view of the prior art and, therefore, to effectively encompass the intended scope of the disclosure.

[0957] The present disclosure is further illustrated by the following non-limiting examples.

### Examples

### Example 1. High-Throughput Screen of TRACER AAV Library in Non-Human Primates (NHPs)

[0958] A TRACER based method as described in WO2020072683, WO 2021/202651, and WO2021230987, the contents of which are herein incorporated by reference in their entirety, was used to generate the AAV capsid variants described herein. An orthogonal evolution approach was combined with a high throughput screening by NGS. Briefly, the library of AAV capsid variants was generated using a sliding window approach, where amino acid modifications, e.g., substitutions, were randomly introduced into various positions across loop VIII of AAV9, including between positions 581-593, relative to a reference sequence numbered according to SEQ ID NO: 138. The initial library (passage 1) was passed first through cynomolgus macaques (Macaca fascicularis, n=2, 2-4 years of age) or human brain microvascular endothelial cells (hBMVECs) followed by cynomolgus macaques (n=2). These first passage libraries were then pooled and screened a second time through cynomolgus macaques (passage 2). After the second passage (e.g., 28 days post injection into two NHPs), RNA was extracted from multiple brain and spinal cord regions. Following RNA recovery and RT-PCR amplification, a systematic NGS enrichment analysis was performed to calculate fold enrichment relative to an AAV9 wild-type control. The top variants were selected for the creation of a synthetic library.

[0959] After creation of the synthetic library with the sub-selected variants, the synthetic library was screened (passage 3) in two NHPs (2-4 years of age). The animals were injected intravenously with the synthetic library. After a period in vivo. (e.g., 28-days) RNA was extracted from nervous tissue, e.g., brain, spinal cord, and DRG of the NHPs. Following RNA recovery and RT-PCR amplification, a systematic NGS enrichment analysis was performed, and the peptides comprised within the variants were identified and the capsid enrichment ratio for each variant compared to the wild-type AAV9 control was calculated (fold enrichment relative to wild-type AAV9). Values above 1 indicate an increase in expression relative to AAV9. All animals were dosed intravenously at 2e13 VG/kg across the screen.

[0960] Following these three passages, approximately 1542 variants were identified with an average fold change greater than wild-type AAV9 in the brain of the NHPs (Macaca fascicularis). Of the 1542 variants, 422 demonstrated a fold-change of greater than 5 and 118 demonstrated a fold-change greater than 10 compared to wild-type and were detected across all brain regions investigated. The capsid variant that demonstrated the greatest fold-change in expression relative to AAV9 in the brain of the NHP comprised the amino acid sequence TQDWHRI (SEQ ID NO: 941), resulting in a fold-change in expression of 460 relative to the AAV9 control (Table 9).

TABLE 9
NGS fold-enrichment of AAV capsid variants
in NHPs (Macaca fascicularis)

| Peptide | SEQ ID | Fold enrichment over AAV9 | | |
|---|---|---|---|---|
| Sequence | NO: | Brain | Spinal cord | DRG |
| TQDWHRI | 941 | 460.196 | 207.400 | 3.677 |

[0961] Taken together, these results demonstrate that after 3 rounds of screening of this AAV9 variant library with loop VIII modifications in NHPs (cynomolgus macaques (Macaca fascicularis)), many AAV capsid variants outperformed the wild-type AAV9, for example, in penetration of the blood brain barrier (BBB) and spinal cord expression.

### Example 2. Individual Capsid Characterization in NHPs

[0962] The goal of these experiments was to determine the transduction level, tropism, ability to cross the blood brain barrier, and overall spatial distribution in the central nervous system (CNS) of a capsid variant selected from the study described in Example 1 relative to AAV9 following intravenous injection in NHPs (cynomolgus macaques (Macaca fascicularis)) and marmosets (Callithrix jacchus). The capsid variant was TTJ-001 (SEQ ID NO: 981 (amino acid) and 983 (DNA), comprising SEQ ID NO: 941 or 201), as outlined in Table 3 above. The amino acid and DNA sequences of TTJ-001 are provided, e.g., in Tables 4 and 5, respectively.

### A. Evaluation of TTJ-001 in Cynomolgus Macaques

[0963] AAV particles were generated with this capsid variant encapsulating a payload-HA tag driven by a heterologous constitutive promoter. The capsid variant and AAV9 control were tested by intravenously administering the AAV particle formulation at 2e13 VG/kg to NHPs (n=2). The in-life period was 14 days and the brain, spinal cord, and peripheral tissues including the heart, liver, and quadriceps were collected for measuring transgene mRNA, transgene protein, and viral DNA (biodistribution). The AAV particles administered to the NHPs comprised single stranded viral genomes.

[0964] The brains isolated from the NHPs injected with the AAV particles encapsulated in the TTJ-001 capsid variant (AAV_TTJ-001) were assayed by ddPCR for the presence of transgene RNA as a measure of transgene expression, and the presence of viral DNA as a measure of viral genome levels. Data were provided as average mRNA fold change for the transgene relative to a housekeeping gene as well as the fold change relative to the AAV9 control (Table 10). As shown in Table 10, mRNA transgene expression from the TTJ-001 capsid variant, which is an AAV9 capsid variant, was significantly higher in the brain of NHPs relative to the wild-type AAV9 control. More specifically, mRNA expression was approximately 40-280-fold higher from the TTJ-001 capsid variant compared to wild-type AAV9 in the brain of NHPs. Additionally, mRNA expression was approximately 3-274-fold higher from the TTJ-001 capsid variants compared to wild-type AAV9 in the spinal cord of the NHPs. Comparable results were obtained when mRNA levels were measured by qPCR.

TABLE 10
Transgene mRNA expression with the
TTJ-001 capsid variant in NHPs

| | | AVG transgene mRNA | |
|---|---|---|---|
| Capsid | | fold change relative | Fold change |
| Variant | Tissue | to housekeeping gene | relative to AAV9 |
| AAV9 | Sensory Cortex | 0.00197 | 1.0 |
| | Motor Cortex | 0.001188 | 1.0 |
| | Putamen | 0.00077 | 1.0 |
| | Thalamus | 0.005241 | 1.0 |
| | Caudate | 0.000484 | 1.0 |
| | Hippocampus | 0.001214 | 1.0 |
| | Cerebellum | 0.001163 | 1.0 |
| | SC Cervical | 0.0119 | 1.0 |
| | SC Thoracic | 0.00545 | 1.0 |
| | SC Lumbar | 1.941 | 1.0 |
| | DRG Lumbar | 2.137 | 1.0 |
| | DRG Sacral | 2.886 | 1.0 |
| | DRG Cervical | 0.626 | 1.0 |
| | DRG Thoracic | 3.291 | 1.0 |
| | Heart | 3.641 | 1.0 |
| | Liver | 1.329 | 1.0 |
| | Quadriceps | 1.431 | 1.0 |
| TTJ-001 | Sensory Cortex | 0.559 | 283.804 |
| | Motor Cortex | 0.628 | 528.829 |
| | Putamen | 0.124 | 161.093 |
| | Thalamus | 0.695 | 132.663 |
| | Caudate | 0.084 | 174.627 |
| | Hippocampus | 0.178 | 146.898 |
| | Cerebellum | 0.046 | 39.784 |
| | SC Cervical | 1.377 | 115.923 |
| | SC Thoracic | 1.497 | 274.522 |
| | SC Lumbar | 7.339 | 3.780 |
| | DRG Lumbar | 20.446 | 9.5662 |
| | DRG Sacral | 6.5096 | 2.2552 |
| | DRG Cervical | 3.429 | 5.4731 |
| | DRG Thoracic | 15.524 | 4.7174 |
| | Heart | 26.573 | 7.299 |
| | Liver | 8.981 | 6.757 |
| | Quadriceps | 19.011 | 13.287 |

[0965] The brains, spinal cord, and peripheral tissues isolated from the NHPs were also assayed for the presence of viral DNA as a measure of viral genome levels by ddPCR, Data are provided in Table 11 as average DNA (viral genome (VG)) copies per diploid genome as well as fold change relative to the AAV9 control. As shown in Table 11, biodistribution of the AAV9 capsid variant, TTJ-001, was significantly higher in the NHP brain relative to the wild-type AAV9 control. Biodistribution of TTJ-001 was lower in the NHP liver relative to the wild-type AAV9 control. Comparable results were obtained when average DNA levels were measured by qPCR.

TABLE 11
Viral DNA biodistribution with the
TTJ-001 capsid variant in NHPs

| Capsid | | AVG DNA copies per | Fold change relative |
|---|---|---|---|
| Variant | Tissue | diploid genome | to AAV9 |
| AAV9 | Sensory Cortex | 0.199017 | 1.0 |
| | Motor Cortex | 0.085628 | 1.0 |
| | Putamen | 1.05028 | 1.0 |
| | Thalamus | 0.187792 | 1.0 |
| | Caudate | 0.083988 | 1.0 |
| | Hippocampus | 0.078499 | 1.0 |
| | Cerebellum | 0.049565 | 1.0 |
| | SC Cervical | 0.104 | 1.0 |
| | SC Thoracic | 0.102 | 1.0 |
| | SC Lumbar | 0.521 | 1.0 |
| | DRG Lumbar | 0.345 | 1.0 |
| | DRG Sacral | 1.005 | 1.0 |
| | DRG Cervical | 0.188 | 1.0 |
| | DRG Thoracic | 0.318 | 1.0 |
| | Heart | 0.934 | 1.0 |
| | Liver | 337.290 | 1.0 |
| | Quadriceps | 1.894 | 1.0 |
| TTJ-001 | Sensory Cortex | 1.590 | 7.989 |
| | Motor Cortex | 1.889 | 22.063 |
| | Putamen | 2.069 | 1.970 |
| | Thalamus | 1.985 | 10.570 |
| | Caudate | 2.151 | 25.615 |
| | Hippocampus | 1.548 | 19.725 |
| | Cerebellum | 0.952 | 19.216 |
| | SC Cervical | 1.836 | 17.646 |
| | SC Thoracic | 0.747 | 7.290 |
| | SC Lumbar | 0.863 | 1.658 |
| | DRG Lumbar | 0.319 | 0.926 |
| | DRG Sacral | 0.249 | 0.248 |
| | DRG Cervical | 1.179 | 6.273 |
| | DRG Thoracic | 1.189 | 3.738 |
| | Heart | 2.286 | 2.448 |
| | Liver | 191.741 | 0.568 |
| | Quadriceps | 0.901 | 0.475 |

[0966] The brain tissues and spinal cords of the mice were also subjected to immunohistochemistry staining to evaluate overall CNS tropism and biodistribution in various regions. Immunohistochemical staining correlated with the qPCR analysis, as TTJ-001 showed significantly stronger staining and more widespread payload expression in the brain and spinal cord, as compared to the AAV9 control. More specifically, TTJ-001 demonstrated moderately to strongly positive staining in the globus pallidus, thalamus, substantia nigra, oculomotor nucleus, geniculate nucleus, central grey, inferior colliculus, external cunate nucleus, gracile nucleus, nucleus ambiguous, ventral horn of the spinal cord, vestibular nucleus, inferior olivary complex, deep cerebellar nuclei, and the DRG. TTJ-001 demonstrated weakly positive to moderately positive staining in the ventral pallidum, amygdala, caudate, putamen, hippocampus, temporal cortex, auditory cortex, and somatosensory cortex.

[0967] The peripheral tissues were also subjected to immunohistochemistry staining to evaluate tropism and biodistribution. TTJ-001 resulted in widespread transduction of multiple peripheral tissues, as compared to the AAV9 control. TTJ-001 demonstrated weakly positive to moderately positive staining in the pancreas and quadriceps and moderately to strongly positive staining in the heart, kidney, and liver.

[0968] Taken together, these data demonstrate that TTJ-001 is an enhanced CNS tropic capsids in NHPs. Additionally, this capsid variant was able to successfully penetrate the blood brain barrier following intravenous injection.

B. Evaluation of TTJ-001 in Marmosets (Callithrix jacchus)

[0969] AAV particles were generated with the TTJ-001 capsid variant or the AAV9 capsid control which comprised a self-complementary viral genome encoding a histone H2b protein with a VSV tag (TTJ-001 capsid variant) or HA tag (AAV9 control capsid) driven by a ubiquitous CAG promoter. The AAV particles comprising the TTJ-001 capsid variant or the AAV9 capsid control were administered to the marmosets (Callithrix jacchus) (n=3) intravenously in a single solution, at the doses indicated in Table 17. The in-life period was 28 days and then various CNS and peripheral tissues were collected for measuring transgene mRNA (expression) by RT-qPCR, protein expression by IHC, and viral DNA (biodistribution) by ddPCR, Data were then normalized to the dose of each viral vector in the dosing solution.

TABLE 17
Titer of the AAV particles comprising the TTJ-001
or AAV9 capsid in the solution dosed in marmosets

| Capsid Variant | Actual Titer Dosed | | Ratio of Capsid Variant to AAV9 |
|---|---|---|---|
| TTJ-001 | 2.23 | vg/mL | 0.56 |
| AAV9 | 4.00 | vg/mL | 1.0 |

[0970] As shown in Table 18, the TTJ-001 capsid variant demonstrated increased biodistribution in the caudate and motor cortex in the brain of the marmosets relative to the AAV9 control. The TTJ-001 capsid variant also led to increased transgene expression (Table 19) in the caudate and motor cortex in the brain of the marmosets. In fact, biodistribution and transgene expression were increased over 5-7 fold and 15-17 fold, respectively, for TTJ-001 in the brain of marmosets relative to AAV9. Similar expression and biodistribution was observed by immunohistochemistry. More specifically, staining for TTJ-001 was detected in the mid-brain, caudate, putamen, thalamus, and cerebellum, and this staining was increased relative to AAV9. Staining for TTJ-001 was also observed in the molecular and granule layer of the cerebellum.

[0971] Biodistribution and transgene expression were also measured in the peripheral tissues of the liver, heart, and quadriceps. In the liver, the TTJ-001 capsid variant exhibited lower biodistribution (Table 18) and transgene expression (Table 19) relative to AAV9, indicating that the TTJ-001 capsid variant was detargeted in the liver relative to AAV9 in marmosets. Additionally, the TTJ-001 capsid variant resulted in increased transduction of the heart and muscle, as compared to the AAV9 control (Table 18 and Table 19).

TABLE 18
Quantification of viral genome copies per diploid genome (biodistribution) by ddPCR following intravenous
administration of AAV particles comprising the TTJ-001 capsid variant normalized to the actual titer
of the viral vector in the dosing solution (vg/dg = viral genome copies/diploid genome)

| | Tissue | | | | | | | | | |
|---|---|---|---|---|---|---|---|---|---|---|
| | Caudate | | Motor Cortex | | Heart | | Muscle | | Liver | |
| | | vg/dg | | vg/dg | | vg/dg | | vg/dg | | vg/dg |
| | | relative | | relative | | relative | | relative | | relative |
| Capsid | vg/dg | to AAV9 | vg/dg | to AAV9 | vg/dg | to AAV9 | vg/dg | to AAV9 | vg/dg | to AAV9 |
| TTJ-001 | 0.10 | 7.23 | 0.13 | 5.86 | 1.41 | 3.43 | 0.51 | 2.67 | 3.05 | 0.22 |
| AAV9 | 0.01 | 1.00 | 0.02 | 1.00 | 0.48 | 1.00 | 0.23 | 1.00 | 13.79 | 1.00 |

TABLE 19
Quantification of transgene mRNA by RT-qPCR following intravenous administration of
AAV particles comprising the TTJ-001 capsid variant normalized to the actual titer
of the viral vector in the dosing solution (mRNA = transgene mRNA fold over housekeeping
gene; rel. to AAV9 = transgene mRNA fold over housekeeping gene relative to AAV9)

| | Tissue | | | | | | | | | |
|---|---|---|---|---|---|---|---|---|---|---|
| | Caudate | | Motor Cortex | | Heart | | Muscle | | Liver | |
| | | rel. to | | rel. to | | rel. to | | rel. to | | rel. to |
| Capsid | mRNA | AAV9 | mRNA | AAV9 | mRNA | AAV9 | mRNA | AAV9 | mRNA | AAV9 |
| TTJ-001 | 0.54 | 17.94 | 0.62 | 15.65 | 28.37 | 2.56 | 0.42 | 4.09 | 0.32 | 0.18 |
| AAV9 | 0.03 | 1.00 | 0.05 | 1.00 | 12.67 | 1.00 | 0.15 | 1.00 | 1.85 | 1.00 |

[0972] These data in marmosets for TTJ-001 were similar to those observed in cynomolgus macaques, demonstrating cross-species compatibility of the TTJ-001 capsid variant.

[0973] Taken together, these data demonstrate that TTJ-001 is an enhanced CNS tropic capsid in marmosets. Additionally, the TTJ-001 capsid variant was able to successfully penetrate the blood brain barrier following intravenous injection in the marmosets.

### C. Further Evaluation of TTJ-001 Cynomolgus Macaques

[0974] AAV particles were generated with the TTJ-001 capsid variant comprising a single stranded viral genome encapsulating a payload-HA tag driven by a heterologous constitutive promoter. The TTJ-001capsid variant and AAV9 control were tested by intravenously administering the AAV particle formulation at 1e13 vg/kg (n=3) or 3e12 vg/kg (n=3) to the NHPs. The in-life period was 28 days and the brain, spinal cord, and peripheral tissues including the heart, liver, and quadriceps were collected for measuring transgene mRNA, transgene protein, and viral DNA (biodistribution).

[0975] As shown in Tables 20 and 21, the TTJ-001 capsid variant demonstrated increased biodistribution and transduction as well as transgene expression in the brain (putamen, motor cortex, frontal cortex, substantia nigra, and dentate nucleus) and spinal cord (cervical C3 ventral horn) relative to AAV9. When dosed at 1e13 vg/kg. TTJ-001 led to at least a 6-9-fold increase in biodistribution in the brain and at least an 8-fold increase in biodistribution in the spinal cord relative to AAV9. With respect to transgene expression, when dosed at 1e13 kg/vg. TTJ-001 demonstrated at least a 25-61-fold increase in expression in the brain and at least a 20-fold increase in the spinal cord relative to AAV9. TTJ-001 also demonstrated comparable biodistribution and transgene expression in the DRG relative to AAV9 (Tables 20 and 21).

[0976] By immunohistochemistry (IHC), when dosed at 1e13 vg/kg. TTJ-001 demonstrated largely neuronal tropism, as evidenced by positive co-staining for HA/SMI 331 (neuronal marker) at least in the putamen and substantia nigra. No staining was observed in astrocytes in the putamen and substantia nigra. Additionally, by IHC, increased staining and transduction by AAV particles comprising the TTJ-001 capsid variant was also observed in multiple brain regions (substantia nigra, putamen, motor cortex, frontal cortex) and the spinal cord regions (cervical region, thoracic region, Clarke's column) of the NHPs, relative to AAV9, when administered at a dose of 1e13 vg/kg. Staining and therefore transduction was also observed in the brain and spinal cord regions even when the AAV particles comprising the TTJ-001 capsid variant were administered at the lower dose of 3e12 vg/kg. Comparable transduction and expression was observed by IHC in the DRG following administration of AAV particles comprising the TTJ-001 capsid variant and AAV particles comprising the AAV9 control capsid. IHC staining of the payload-HA positive cells of various brain regions following transduction with the AAV particles comprising the TTJ-001 capsid variant or AAV particles comprising an AAV9 control capsid was also quantified (Table 22). At a dose of 1e13 vg/kg. TTJ-001 was capable of transducing greater than 2-9% of cells across the various brain regions investigated (Table 22). Even at the low dose of 3e12 vg/kg. TTJ-001 was capable of transducing greater than 0.9 to 5% cells in the brain regions tested (Table 22). The percent HA+ cells in Table 22 may underestimate true positivity for the TTJ-001 capsid variant, as it demonstrated neuronal tropism.

[0977] Biodistribution and transgene expression were also measured in the peripheral tissues of the liver and heart. In the liver, at a dose of 1e13 vg/kg, the TTJ-001 capsid variant exhibited lower biodistribution (Table 20) and transgene expression (Table 21) relative to AAV9, indicating that the TTJ-001 capsid variant was detargeted in the liver relative to AAV9. At the 1e13 vg/kg dose, the TTJ-001 demonstrated comparable biodistribution but decreased transgene expression in the heart relative to AAV9 (Tables 20 and 21). Similar transduction and expression was observed in the heart by IHC following transduction with AAV particles comprising the TTJ-001 capsid variant and AAV particles comprising the AAV9 capsid control at a dose of 1e13 vg/kg.

TABLE 20
Quantification of viral genome copies per diploid genome (biodistribution)
by ddPCR following intravenous administration of AAV particles comprising
the TTJ-001 capsid variant (vg/dg = viral genome copies/diploid genome)

| | | Tissues | | | | | |
|---|---|---|---|---|---|---|---|
| | | Putamen | | Motor Cortex | | Frontal Cortex | |
| | | | vg/dg | | vg/dg | | vg/dg |
| | Dose | | relative | | relative | | relative |
| Capsid | (vg/kg) | vg/dg | to AAV9 | vg/dg | to AAV9 | vg/dg | to AAV9 |
| AAV9 | 1e13 | 0.23 | 1.00 | 0.31 | 1.00 | 0.25 | 1.00 |
| TTJ-001 | 1e13 | 1.48 | 6.54 | 2.69 | 8.70 | 2.03 | 8.23 |
| TTJ-001 | 3e12 | 1.03 | | 1.26 | | 1.02 | |
| | | Substantia Nigra | | Dentate Nucleus | | C3 Ventral Horn | |
| | | | vg/dg | | vg/dg | | vg/dg |
| | Dose | | relative | | relative | | relative |
| Capsid | (vg/kg) | vg/dg | to AAV9 | vg/dg | to AAV9 | vg/dg | to AAV9 |
| AAV9 | 1e13 | 0.28 | 1.00 | 0.24 | 1.00 | 0.45 | 1.00 |
| TTJ-001 | 1e13 | 2.55 | 9.24 | 2.76 | 11.5 | 3.64 | 8.14 |
| TTJ-001 | 3e12 | 1.07 | | 0.857 | | 1.55 | |

| | | DRG (C3) | | Liver | | Heart | |
|---|---|---|---|---|---|---|---|
| | | | vg/dg | | vg/dg | | vg/dg |
| | Dose | | relative | | relative | | relative |
| Capsid | (vg/kg) | vg/dg | to AAV9 | vg/dg | to AAV9 | vg/dg | to AAV9 |
| AAV9 | 1e13 | 0.72 | 1.00 | 140.22 | 1.00 | 2.38 | 1.00 |
| TTJ-001 | 1e13 | 0.60 | 0.84 | 33.51 | 0.24 | 2.68 | 1.13 |
| TTJ-001 | 3e12 | 0.15 | | 10.23 | | 0.76 | |

TABLE 21
Quantification of transgene mRNA by RT-qPCR following intravenous
administration of AAV particles comprising the TTJ-001 capsid variant
(mRNA = transgene mRNA fold over housekeeping gene; rel. to
AAV9 = transgene mRNA fold over housekeeping gene relative to AAV9)

| | | Tissues | | | | | |
|---|---|---|---|---|---|---|---|
| | | Frontal Cortex | | Motor Cortex | | Putamen | |
| | Dose | | rel. to | | rel. to | | rel. to |
| Capsid | (vg/kg) | mRNA | AAV9 | mRNA | AAV9 | mRNA | AAV9 |
| AAV9 | 1e13 | 0.04 | 1.00 | 0.03 | 1.00 | 0.05 | 1.00 |
| TTJ-001 | 1e13 | 1.09 | 28.14 | 1.60 | 61.76 | 1.79 | 33.43 |
| TTJ-001 | 3e12 | 0.34 | | 0.44 | | 1.07 | |
| | | Substantia Nigra | | C3 Ventral Horn | | DRG (C3) | |
| | Dose | | rel. to | | rel. to | | rel. to |
| Capsid | (vg/kg) | mRNA | AAV9 | mRNA | AAV9 | mRNA | AAV9 |
| AAV9 | 1e13 | 0.14 | 1.00 | 1.40 | 1.00 | 26.01 | 1.00 |
| TTJ-001 | 1e13 | 3.64 | 25.33 | 28.16 | 20.14 | 41.63 | 1.60 |
| TTJ-001 | 3e12 | 1.57 | | 2.42 | | 5.81 | |
| | | Dentate Nucleus | | Heart | | Liver | |
| | Dose | | rel. to | | rel. to | | rel. to |
| Capsid | (vg/kg) | mRNA | AAV9 | mRNA | AAV9 | mRNA | AAV9 |
| AAV9 | 1e13 | 0.22 | 1.0 | 48.99 | 1.00 | 5.39 | 1.00 |
| TTJ-001 | 1e13 | 13.01 | 59.136 | 36.31 | 0.74 | 1.40 | 0.26 |
| TTJ-001 | 3e12 | 4.497 | | 18.18 | | 0.87 | |

TABLE 22
Quantification of payload-HA positive
cells by immunohistochemistry

| | | % HA + cells per region | | | |
|---|---|---|---|---|---|
| | Dose | Frontal | Motor | | Substantia |
| Capsid | (vg/kg) | Cortex | Cortex | Putamen | Nigra |
| AAV9 | 1e13 | 0.5 | 0.1 | 0.6 | 1.3 |
| TTJ-001 | 1e13 | 3.6 | 2 | 9.2 | 9.8 |
| TTJ-001 | 3e12 | 2.9 | 0.9 | 3.9 | 5.6 |

[0978] These data further confirm that TTJ-001 is a CNS tropic capsid, capable of crossing the blood brain barrier following intravenous administration in NHPs.

### Example 3. Evaluation of TTJ-001 AA V9 Capsid Variant in Diverse Primate Species

[0979] This Example evaluates the tropism and cross-species compatibility of the TTJ-001 (SEQ ID NO: 981 (amino acid) and 983 (DNA), comprising SEQ ID NO: 941 or 201) capsid variant in two diverse primate species, marmosets (Callithrix jacchus) and African green monkeys (Chlorocebus sabaeus), as compared to their tropism in cynomolgus macaques (Macaca fascicularis) provided in Example 1 and 2.

[0980] To investigate tropism in African green monkeys, AAV particles comprising the TTJ-001 capsid variant or an AAV9 control, under the control of a synapsin promoter, were intravenously injected into NHPs (n=2, 3-12 years of age) at a dose of 2E13 vg/kg. After 14-days in life, the brains and tissues (liver, DRG, quadriceps, and heart) of the NHPs were collected and RNA was extracted. Following RNA recovery and RT-PCR amplification, a systematic NGS enrichment analysis was performed to calculate the fold enrichment ratio relative to the AAV9 wild-type control.

[0981] To investigate tropism in marmoset monkeys, AAV particles comprising the TTJ-001 capsid variant or an AAV9 control, were intravenously injected into the NHPs (n=2, >10 months of age) at a dose of 2E13 vg/kg (8.75E12 vg/mL). After 28-days in life, the brains and tissues (liver quadriceps, and heart) of the NHPs were collected and RNA was extracted. Following RNA recovery and RT-PCR amplification, a systematic NGS enrichment analysis was performed to calculate the fold enrichment ratio relative to the AAV9 wild-type control.

[0982] As provided in Table 12 (African green monkeys) and Table 13 (marmosets), the TTJ-001 capsid variant demonstrated increased CNS tropism in diverse primate species. The TTJ-001 capsid variant demonstrated a 460.2-fold increase in expression relative to AAV9 in the brain of cynomolgus macaques (Table 9, Example 1), a 14.67-fold increase in expression relative to AAV9 in the brain of African green monkeys, and a 24.2-fold increase in expression relative to AAV9 in the brain of marmosets.

TABLE 12
NGS fold-enrichment of TTJ-001 AAV capsid
variant comprising SEQ ID NO: 941 in
African green monkeys

| | SEQ | Fold enrichment relative to AAV9 | | | | | |
|---|---|---|---|---|---|---|---|
| Se- | ID | | | | Liver | Liver | Muscle |
| quence | NO: | Brain | DRG | Heart | DNA | RNA | DNA |
| TQDWHRI | 941 | 14.670 | 0.05099 | 1.4567 | 0.1935 | 0.4688 | 1.2547 |

TABLE 13
NGS-fold enrichment of TTJ-001 (comprises
SEQ ID NO: 941) in marmosets

| | SEQ | Fold enrichment relative to AAV9 | | | | |
|---|---|---|---|---|---|---|
| Se- | ID | | | Liver | Liver | Muscle |
| quence | NO: | Brain | Heart | DNA | RNA | DNA |
| TQDWHRI | 941 | 24.2163 | 1.5775 | 0.0720 | 0.1706 | 3.6998 |

[0983] Taken together, these data demonstrate that the AAV9 capsid variant TTJ-001 demonstrated increased CNS tropism relative to the AAV9 control in the CNS across three diverse primate species, providing evidence of strong cross-species capacity.

### Example 4. Maturation of TTJ-001 Capsid in NHPs and Mice

[0984] This Example describes maturation of the AAV9 capsid variant, TTJ-001 (SEQ ID NO: 981 (amino acid) and 983 (DNA), comprising SEQ ID NO: 941 (encoded by SEQ ID NO: 942)) or 201) in two species of NHPs, cynomolgus macaques (Macaca fascicularis) and marmosets (Callithrix jacchus) to further enhance their transduction and biodistribution in the central nervous system as well as other tissues, and evolve the AAV capsid variants to provide further cross-species compatibility. The TTJ-001 capsid variant was also matured in mice. Two approaches were used to mature the TTJ-001 capsid sequence in order to randomize and mutate within and around the peptide insert comprised within loop VIII of the capsid variant. In the first maturation approach, sets of three contiguous amino acids were randomized across the mutagenesis region in the TTJ-001 sequence, which spanned from position 582 to position 593, numbered according to SEQ ID NO: 981. In the second maturation approach, mutagenic primers were used to introduce point mutations at a low frequency, scattered across the mutagenesis region in the TTJ-001 sequence ranging from position 582 to position 593, numbered according to SEQ ID NO: 981.

[0985] The library of pooled matured AAV capsid variants generated from TTJ-001 using the first maturation approach and the library of pooled matured AAV capsid variants generated from TTJ-001 using the second maturation approach were each injected into two cynomolgus macaques (Macaca fascicularis), two marmosets (Callithrix jacchus), and three outbred mice. After a 14 or 28 day period in life, the brains of the NHPs and mice were isolated and RNA was extracted. Following RNA recovery and RT-PCR amplification, a systematic NGS enrichment analysis was performed to calculate the fold enrichment ratio relative to the TTJ-001 non-matured control or an AAV9 control, and the peptides comprised within the variants were identified.

[0986] Following the RNA recovery and NGS analysis from the second maturation approach, the matured capsid variants were filtered based on their coefficient of variation (CV), which was calculated for each peptide across the brain samples taken from the NHPs and mice. Those that had a CV value <1 were identified, as these were the peptides that were reliably detected in the majority of samples isolated from the brains of the two NHPs. The peptides were also filtered based on a read per million (RPM) greater than or equal to 1 in the original virus stock.

[0987] Table 14 provides the peptide sequences of the matured capsid variants from the first maturation approach having an RPM greater than or equal to 1 in the original virus stock, a CV of less than 1 for the brain samples isolated, and that also demonstrated a 24-fold or greater fold-increase in expression in the brain relative to the AAV9 control in the brain of cynomolgus macaques (Macaca fascicularis) and/or a 50-fold or greater fold-increase in expression in the brain relative to the AAV9 control in the brain of marmosets (Callithrix jacchus), that were also detected in the maturation screen in mice, as these variants demonstrate cross-species compatibility. For example, the TTJ-001 capsid variants comprising SEQ ID NOs: 205, 208, 212, 219, 286, and 307 generated using the first maturation approach demonstrated a fold change greater than the non-matured TTJ-001 control and the AAV9 control in both species of NHPs and mice. TTJ-001 capsid variants comprising SEQ ID NOs: 262-265 generated using the first maturation approach demonstrated a fold change greater than the non-matured TTJ-001 control and the AAV9 control in both species of NHPs.

TABLE 14
NGS fold-enrichment of the TTJ-001 matured AAV capsid variants in the brain of
cynomolgus macaques, marmosets, and mice generated using the first maturation approach

| | | Brain of cynomolgus | | | | | |
|---|---|---|---|---|---|---|---|
| | | macaques | | Brain of marmosets | | Brain of mice | |
| | | | Fold | Fold | Fold | Fold | Fold |
| | | Fold change | change | change | change | change | change |
| | SEQ | relative | relative | relative | relative | relative | relative |
| | ID | to | to | to | to | to | to |
| Sequence | NO | AAV9 | TTJ-001 | AAV9 | TTJ-001 | AAV9 | TTJ-001 |
| TNHQSAQAQAQTGWV | 200 | 1.000 | 0.012 | 1.000 | 0.009 | 1.000 | 0.337 |
| TNTQDWHRIAQTGWV | 201 | 86.808 | 1.000 | 107.267 | 1.000 | 2.968 | 1.000 |
| TNTKDWHRIAQTGWV | 202 | 104073.655 | 1198.899 | 103.431 | 0.964 | 1.864 | 0.628 |
| TNNQDWHRIAQTGWV | 203 | 5142.077 | 59.235 | 97.137 | 0.906 | 1.841 | 0.620 |
| SNTQDWHRIAQTGWV | 204 | 328.308 | 3.782 | 79.847 | 0.744 | 1.327 | 0.447 |
| TTNQDWHRIAQTGWV | 205 | 276.077 | 3.180 | 114.308 | 1.066 | 5.302 | 1.786 |
| TTIQDWHRIAQTGWV | 206 | 260.231 | 2.998 | 141.163 | 1.316 | 3.616 | 1.218 |
| TTSQDWHRIAQTGWV | 207 | 210.077 | 2.420 | 92.842 | 0.866 | 5.559 | 1.873 |
| TTTQDWHRIAQTGWV | 208 | 169.577 | 1.953 | 120.786 | 1.126 | 4.445 | 1.498 |
| TTAQDWHRIAQTGWV | 209 | 164.462 | 1.895 | 79.735 | 0.743 | 5.480 | 1.846 |
| TVKQDWHRIAQTGWV | 210 | 160.308 | 1.847 | 0.994 | 0.009 | 1.709 | 0.576 |
| TNTQDWHRIAQTGWA | 211 | 147.692 | 1.701 | 100.449 | 0.936 | 6.250 | 2.106 |
| TNTQDWHRIAGTGWV | 212 | 146.231 | 1.685 | 134.751 | 1.256 | 3.718 | 1.253 |
| TNIQDWHRIAQTGWV | 213 | 132.423 | 1.525 | 108.511 | 1.012 | 3.557 | 1.198 |
| TNTQDWHRIAGSNWV | 214 | 122.115 | 1.407 | 130.419 | 1.216 | 0.711 | 0.240 |
| TNTQDWHRIAGTNWV | 215 | 122.077 | 1.406 | 83.846 | 0.782 | 2.332 | 0.786 |
| TNTQDWHRVPQTGWV | 216 | 110.962 | 1.278 | 96.982 | 0.904 | 5.602 | 1.887 |
| TNTQDWHRIAQTNWV | 217 | 106.346 | 1.225 | 92.251 | 0.860 | 1.014 | 0.342 |
| STIQDWHRIAQTGWV | 218 | 106.077 | 1.222 | 64.835 | 0.604 | 3.720 | 1.253 |
| TTVQDWHRIAQTGWV | 219 | 105.962 | 1.221 | 73.066 | 0.681 | 4.468 | 1.505 |
| TGTQDWHRIAQTGWV | 220 | 105.769 | 1.218 | 78.978 | 0.736 | 6.607 | 2.226 |
| TNTRDWHRIAQTGWV | 221 | 101.000 | 1.163 | 40.015 | 0.373 | 0.761 | 0.257 |
| TNTQDWHRVNQTGWV | 222 | 98.154 | 1.131 | 54.952 | 0.512 | 1.045 | 0.352 |
| TNTQDWHRIAQTGWI | 223 | 94.692 | 1.091 | 55.884 | 0.521 | 1.082 | 0.364 |
| SNIQDWHRIAQTGWV | 224 | 90.846 | 1.047 | 73.408 | 0.684 | 1.109 | 0.374 |
| TYTQDWHRIAQTGWV | 225 | 90.192 | 1.039 | 105.558 | 0.984 | 3.048 | 1.027 |
| TNTEDWHRIAQTGWV | 226 | 82.077 | 0.946 | 58.641 | 0.547 | 2.900 | 0.977 |
| TNIEDWHRIAQTGWV | 227 | 81.462 | 0.938 | 41.710 | 0.389 | 4.566 | 1.538 |
| TNTQDWHRISGTGWV | 228 | 77.077 | 0.888 | 95.306 | 0.888 | 1.434 | 0.483 |
| TNSQDWHRIAQTGWV | 229 | 73.231 | 0.844 | 95.140 | 0.887 | 1.184 | 0.399 |
| STTQDWHRIAQTGWV | 230 | 71.269 | 0.821 | 89.973 | 0.839 | 5.816 | 1.959 |
| TNTSDWHRIAQTGWV | 231 | 68.231 | 0.786 | 42.394 | 0.395 | 1.789 | 0.603 |
| TNTQDWHRVAQTGWV | 232 | 67.962 | 0.783 | 179.050 | 1.669 | 5.439 | 1.832 |
| TNTQDWHRIAQTGWD | 233 | 67.308 | 0.775 | 97.864 | 0.912 | 2.755 | 0.928 |
| TNTQDWHRVTMTGWV | 234 | 60.077 | 0.692 | 128.642 | 1.199 | 3.098 | 1.044 |
| TNTQDWHRISMTGWV | 235 | 55.808 | 0.643 | 64.425 | 0.601 | 2.134 | 0.719 |
| TNTQDWHRISQTGWV | 236 | 55.808 | 0.643 | 106.204 | 0.990 | 1.941 | 0.654 |
| TNTQDWHRVSQTGWV | 237 | 53.538 | 0.617 | 149.383 | 1.393 | 3.516 | 1.185 |
| TSTQDWHRIAQTGWV | 238 | 52.846 | 0.609 | 80.307 | 0.749 | 6.952 | 2.342 |
| TNTQDWHRIANTGWV | 239 | 51.154 | 0.589 | 95.615 | 0.891 | 2.470 | 0.832 |
| TNTQDWHRIANSVWV | 240 | 47.808 | 0.551 | 68.424 | 0.638 | 1.936 | 0.652 |
| TNTQDWHRIWQTGWV | 241 | 41.577 | 0.479 | 127.904 | 1.192 | 2.364 | 0.796 |
| TNTQDWHRIFQTGWV | 242 | 37.654 | 0.434 | 62.285 | 0.581 | 2.250 | 0.758 |
| TNTQDWHRIQQTGWV | 243 | 37.154 | 0.428 | 52.927 | 0.493 | 1.568 | 0.528 |
| TNTQDWHRIPQTGWV | 244 | 35.231 | 0.406 | 123.655 | 1.153 | 2.259 | 0.761 |
| KNTQDWHRIAQTGWV | 245 | 34.500 | 0.397 | 72.759 | 0.678 | 1.448 | 0.488 |
| TNTQVWHRIAQTGWV | 246 | 34.346 | 0.396 | 141.787 | 1.322 | 1.668 | 0.562 |
| TNTQDWHRVQQTGWV | 247 | 32.692 | 0.377 | 36.503 | 0.340 | 1.350 | 0.455 |
| STSQDWHRIAQTGWV | 248 | 31.308 | 0.361 | 64.130 | 0.598 | 2.616 | 0.881 |
| SNSQDWHRIAQTGWV | 249 | 30.769 | 0.354 | 39.277 | 0.366 | 0.834 | 0.281 |
| TNTQDWHRIFMTGWV | 250 | 28.462 | 0.328 | 179.824 | 1.676 | 1.027 | 0.346 |
| TNTQHWHRIAQTGWV | 251 | 28.154 | 0.324 | 71.807 | 0.669 | 1.630 | 0.549 |
| TNTQNWHRIAQTGWV | 252 | 27.500 | 0.317 | 47.538 | 0.443 | 0.925 | 0.312 |
| TNLQDWHRIAQTGWV | 253 | 26.500 | 0.305 | 48.431 | 0.451 | 0.882 | 0.297 |
| TNTQDWHRIAMTGWV | 254 | 25.885 | 0.298 | 53.924 | 0.503 | 2.466 | 0.831 |
| TITQDWHRIAQTGWV | 255 | 24.192 | 0.279 | 37.506 | 0.350 | 4.073 | 1.372 |
| TNTQAWHRIAQTGWV | 256 | 17.885 | 0.206 | 103.032 | 0.960521 | 1.363636 | 0.459418 |
| TNTQDWHRIANTQWV | 257 | 21.654 | 0.249 | 93.59179 | 0.872514 | 1.527273 | 0.514548 |
| TNTQDWHRIAKTGWV | 258 | 23.615 | 0.272 | 75.35993 | 0.702546 | 1.061364 | 0.35758 |
| TNTQDWHRIAQTRWV | 259 | 11.769 | 0.136 | 65.30475 | 0.608806 | 0.713636 | 0.240429 |
| TSMQDWHRIAQTGWV | 260 | 12.808 | 0.148 | 61.10777 | 0.56968 | 3.618182 | 1.218989 |
| TNTQDWHRISNTGWV | 261 | 17.423 | 0.201 | 56.85073 | 0.529993 | 1.122727 | 0.378254 |
| TNTQDWHRIANNNWV | 262 | 109.038 | 1.256 | 131.614 | 1.227 | | |
| TNTQDWHRIYQTGWV | 263 | 117.000 | 1.348 | 122.610 | 1.143 | | |
| TNTPDWHRIAQTGWV | 264 | 150.192 | 1.730 | 110.406 | 1.029 | | |
| TNTQDWHRINQTGWV | 265 | 104.962 | 1.209 | 133.429 | 1.244 | | |
| TTLQDWHRIAQTGWV | 286 | 96.692 | 1.114 | 89.011 | 0.830 | 5.220 | 1.759 |
| TNTQDWHRIAQTGWS | 307 | 100.192 | 1.154 | 159.377 | 1.486 | 3.989 | 1.344 |

[0988] Table 15 provides the peptide sequences of the matured capsid variants from the second maturation approach having an RPM greater than or equal to 1 in the original virus stock, a CV of less than 1 for the brain samples isolated, and that also demonstrated a 36-fold or greater fold-increase in expression in the brain relative to the AAV9 control in the brain of cynomolgus macaques (Macaca fascicularis) and/or about a 10-fold or greater fold-increase in expression in the brain relative to the AAV9 control in the brain of marmosets (Callithrix jacchus), that were also detected in the maturation screen in mice, as these variants demonstrate cross-species compatibility. For example, the TTJ-001 capsid variants comprising SEQ ID NOs: 283, 286, 290, 291, and 293 generated using the second maturation approach demonstrated a fold change greater than the non-matured TTJ-001 control and the AAV9 control in both species of NHPs and mice. The TTJ-001 capsid variants comprising SEQ ID NOs: 205, 208, 212, 213, or 307 generated using the second maturation approach demonstrated a fold change greater than the non-matured TTJ-001 control in cynomolgus macaques and mice and a fold-change greater than the AAV9 control in both species of NHPs and mice. The TTJ-001 capsid variants comprising SEQ ID NOs: 219 and 265 generated using the second maturation approach demonstrated a fold change greater than the non-matured TTJ-001 control and the AAV9 control in both species of NHPs and the TTJ-001 capsid variant comprising SEQ ID NO: 263 generated using the second maturation approach lead to a fold-change greater than AAV9 in both species of NHPs and a fold-change greater than TTJ-001 in marmosets.

TABLE 15
NGS fold-enrichment of the TTJ-001 matured AAV capsid variants in the brain of
cynomolgus macaques, marmosets, and mice generated using the second maturation approach

| | | Brain of cynomolgus | | Brain of marmosets | | | |
|---|---|---|---|---|---|---|---|
| | | macaques | | (Callithrix jacchus) | | Brain of mice | |
| | | Fold | Fold | Fold | Fold | Fold | Fold |
| | | change | change | change | change | change | change |
| | SEQ | relative | relative | relative | relative | relative | relative |
| | ID | to | to | to | to | to | to |
| Sequence | NO | AAV9 | TTJ-001 | AAV9 | TTJ-001 | AAV9 | TTJ-001 |
| TNHQSAQAQAQTGWV | 200 | 1.000 | 0.014 | 1.000 | 0.082 | 1.000 | 0.552 |
| TNTQDWHRIAQTGWV | 201 | 73.612 | 1.000 | 12.159 | 1.000 | 1.812 | 1.000 |
| TNTKDWHRIAQTGWV | 202 | 33375.082 | 453.390 | 5.684 | 0.467 | 0.419 | 0.231 |
| TTTKDWHRIAQTGWV | 268 | 25769.367 | 350.069 | 5.950 | 0.489 | 0.588 | 0.324 |
| TNIKDWHRIAQTGWV | 269 | 24409.245 | 331.592 | 7.741 | 0.637 | 0.467 | 0.258 |
| TSTKDWHRIAQTGWV | 270 | 12410.469 | 168.592 | 4.343 | 0.357 | 0.544 | 0.300 |
| SNNQDWHRIAQTGWV | 271 | 2542.510 | 34.539 | 3.599 | 0.296 | 0.387 | 0.214 |
| TNNQDWHRIAQTGWV | 203 | 1335.286 | 18.139 | 8.723 | 0.717 | 0.868 | 0.479 |
| TNNQDWHRIAQTGWA | 272 | 1313.633 | 17.845 | 8.078 | 0.664 | 1.935 | 1.068 |
| TTNQDWHRIAQTGWV | 205 | 1301.776 | 17.684 | 12.114 | 0.996 | 2.992 | 1.652 |
| TNNQDWHRISQTGWV | 273 | 1283.327 | 17.434 | 7.778 | 0.640 | 0.788 | 0.435 |
| TNNQDWHRVAQTGWV | 274 | 1237.306 | 16.808 | 10.524 | 0.866 | 2.197 | 1.213 |
| SNMQTALQLAQTGWV | 275 | 811.857 | 11.029 | 1.133 | 0.093 | 0.562 | 0.310 |
| TSNQDWHRIAQTGWV | 276 | 691.816 | 9.398 | 1.580 | 0.130 | 0.567 | 0.313 |
| TNNQDWHRIPQTGWV | 277 | 653.020 | 8.871 | 7.901 | 0.650 | 0.539 | 0.298 |
| TNNQDWHRIAQTGWD | 278 | 597.592 | 8.118 | 4.004 | 0.329 | 0.571 | 0.315 |
| TNNQDWHRIAQTGWF | 279 | 411.490 | 5.590 | 3.987 | 0.328 | 0.450 | 0.248 |
| INNQDWHRIAQTGWV | 280 | 342.551 | 4.653 | 3.427 | 0.282 | 0.391 | 0.216 |
| TYNQDWHRIAQTGWV | 281 | 299.327 | 4.066 | 2.838 | 0.233 | 1.226 | 0.677 |
| TTIQDWHRIAQTGWV | 206 | 168.531 | 2.289 | 11.981 | 0.985 | 2.141 | 1.182 |
| TINQDWHRIAQTGWV | 282 | 142.776 | 1.940 | 1.775 | 0.146 | 0.384 | 0.212 |
| SNIQDWHRIAQTGWV | 224 | 133.633 | 1.815 | 3.791 | 0.312 | 0.677 | 0.374 |
| STTQDWHRIAQTGWV | 230 | 122.041 | 1.658 | 8.430 | 0.693 | 3.141 | 1.734 |
| SNTQDWHRIAQTGWV | 204 | 119.367 | 1.622 | 7.652 | 0.629 | 0.662 | 0.365 |
| TNIQDWHRVAQTGWV | 283 | 111.469 | 1.514 | 15.433 | 1.269 | 2.916 | 1.609 |
| TNIQDWHRIAQTGWA | 284 | 109.082 | 1.482 | 8.147 | 0.670 | 2.139 | 1.181 |
| SNTQDWHRVAQTGWV | 285 | 108.653 | 1.476 | 9.001 | 0.740 | 1.973 | 1.089 |
| TTLQDWHRIAQTGWV | 286 | 106.367 | 1.445 | 12.205 | 1.004 | 3.363 | 1.856 |
| TNTQDWHTIAHTGWV | 287 | 99.388 | 1.350 | 8.489 | 0.698 | 0.953 | 0.526 |
| SNTQDWHRIAQTGWG | 288 | 94.020 | 1.277 | 9.090 | 0.748 | 0.406 | 0.224 |
| TTSQDWHRIAQTGWV | 207 | 93.306 | 1.268 | 10.701 | 0.880 | 2.795 | 1.543 |
| TNNQDWHKIAQTGWV | 289 | 92.265 | 1.253 | 1.508 | 0.124 | 0.351 | 0.194 |
| TTTQDWHRVAQTGWV | 290 | 89.898 | 1.221 | 18.615 | 1.531 | 2.202 | 1.216 |
| TNSQDWHRIAQTGWA | 291 | 89.245 | 1.212 | 13.447 | 1.106 | 2.235 | 1.234 |
| TNIQDWHRIAQTGWV | 213 | 89.224 | 1.212 | 12.043 | 0.990 | 2.065 | 1.139 |
| TNTQDWHRVPQTGWV | 216 | 89.041 | 1.210 | 10.853 | 0.893 | 3.075 | 1.697 |
| SNTQDWHRISQTGWV | 292 | 88.245 | 1.199 | 4.468 | 0.367 | 0.402 | 0.222 |
| TNSQDWHRVAQTGWV | 293 | 86.367 | 1.173 | 17.030 | 1.401 | 2.246 | 1.240 |
| TNTQDWHRIAGTGWV | 212 | 84.469 | 1.147 | 8.580 | 0.706 | 2.620 | 1.446 |
| TNIQDWHRISQTGWV | 294 | 79.510 | 1.080 | 9.123 | 0.750 | 1.735 | 0.958 |
| TYIQDWHRIAQTGWV | 295 | 77.102 | 1.047 | 10.317 | 0.849 | 1.416 | 0.781 |
| TTTQDWHRIAQTGWV | 208 | 75.980 | 1.032 | 11.968 | 0.984 | 2.567 | 1.417 |
| TNNQDWHRNAQTGWV | 296 | 75.898 | 1.031 | 1.070 | 0.088 | 0.386 | 0.213 |
| TITQDWHRVAQTGWV | 297 | 72.612 | 0.986 | 15.948 | 1.312 | 1.677 | 0.926 |
| TNNQDSHRIAQTGWV | 298 | 72.286 | 0.982 | 0.842 | 0.069 | 0.461 | 0.254 |
| TNTEDWHRVAQTGWV | 299 | 70.939 | 0.964 | 6.856 | 0.564 | 2.898 | 1.600 |
| TTTQDWHRIPQTGWV | 300 | 69.959 | 0.950 | 14.367 | 1.182 | 2.088 | 1.152 |
| TSTQDWHRIAQTGWA | 301 | 67.816 | 0.921 | 10.481 | 0.862 | 3.038 | 1.677 |
| TNTQDWHRVAQTGWV | 232 | 67.265 | 0.914 | 15.332 | 1.261 | 2.838 | 1.566 |
| SNSQDWHRIAQTGWV | 249 | 66.347 | 0.90 | 3.312 | 0.272 | 0.374 | 0.207 |
| TNTQDWHRIAQTGWC | 302 | 66.163 | 0.899 | 10.852 | 0.893 | 2.340 | 1.292 |
| TNTQDWHRSAQTGWA | 303 | 65.796 | 0.894 | 5.320 | 0.438 | 2.829 | 1.562 |
| TNNQDWQRIAQTGWV | 304 | 65.449 | 0.889 | 1.976 | 0.163 | 0.498 | 0.275 |
| TNIQDWHRIPQTGWV | 305 | 64.918 | 0.882 | 8.006 | 0.658 | 1.939 | 1.070 |
| TTTQDWHRIAQTGWI | 306 | 64.755 | 0.880 | 10.242 | 0.842 | 2.323 | 1.282 |
| TNTQDWHRIAQTGWA | 211 | 64.531 | 0.877 | 9.148 | 0.752 | 2.256 | 1.245 |
| TNTQDWHRIAQTNWV | 217 | 64.531 | 0.877 | 10.720 | 0.882 | 0.547 | 0.302 |
| TNTQDWHRISQTGWV | 236 | 64.408 | 0.875 | 11.776 | 0.969 | 1.264 | 0.697 |
| TNTQDWHRIAQTGWS | 307 | 61.061 | 0.829 | 8.875 | 0.730 | 2.011 | 1.110 |
| TTTQDWHRISQTGWV | 308 | 60.571 | 0.823 | 12.149 | 0.999 | 2.217 | 1.223 |
| TSTQDWHRVAQTGWV | 309 | 60.020 | 0.815 | 14.685 | 1.208 | 4.129 | 2.279 |
| TNSQDWHKIAQTGWA | 310 | 58.653 | 0.797 | 0.316 | 0.026 | 0.428 | 0.236 |
| TNIEDWHRIAQTGWV | 227 | 57.184 | 0.777 | 6.278 | 0.516 | 2.206 | 1.217 |
| TNIQDWHRIAQTGWD | 311 | 56.224 | 0.764 | 6.485 | 0.533 | 1.055 | 0.582 |
| TNTQDWHRIAQTGWI | 223 | 55.306 | 0.751 | 7.555 | 0.621 | 0.530 | 0.292 |
| TYTQDWHKIAQTGWV | 312 | 53.878 | 0.732 | 8.042 | 0.661 | 2.631 | 1.452 |
| TYTQDWHRIAQTGWA | 313 | 53.633 | 0.729 | 12.179 | 1.002 | 1.007 | 0.556 |
| TNSQDWHRIAQTGWV | 229 | 52.959 | 0.719 | 8.475 | 0.697 | 0.662 | 0.365 |
| TNTQDWHRISQTGWA | 314 | 52.939 | 0.719 | 11.037 | 0.908 | 2.278 | 1.257 |
| TNTEDWHRIAQTGWV | 226 | 52.469 | 0.713 | 5.899 | 0.485 | 1.515 | 0.836 |
| TNMQDWHRIAQTGWV | 315 | 52.143 | 0.708 | 6.363 | 0.523 | 1.473 | 0.813 |
| TGTQDWHRIAQTGWV | 220 | 51.755 | 0.703 | 10.758 | 0.885 | 3.423 | 1.889 |
| TNTQDWHRIAQTGWT | 316 | 50.612 | 0.688 | 16.498 | 1.357 | 1.282 | 0.708 |
| TITQDWHRTAQTGWV | 317 | 50.143 | 0.681 | 3.892 | 0.320 | 3.096 | 1.709 |
| TNTQDWHRVAQTGWA | 318 | 49.163 | 0.668 | 8.373 | 0.689 | 2.504 | 1.382 |
| SNTQDWHRIAQTAWV | 319 | 49.143 | 0.668 | 7.360 | 0.605 | 0.852 | 0.470 |
| TNNQDGQRIAQTGWV | 320 | 48.980 | 0.665 | 0.240 | 0.020 | 0.569 | 0.314 |
| TNNQDGHRIAQTGWV | 321 | 47.755 | 0.649 | 1.436 | 0.118 | 0.621 | 0.343 |
| TNTQDWHRVSQTGWV | 237 | 47.245 | 0.642 | 17.402 | 1.431 | 2.254 | 1.244 |
| TNNQDLHRIAQTGWV | 322 | 46.837 | 0.636 | 1.208 | 0.099 | 0.495 | 0.273 |
| TNTSDWHRIAQTGWV | 231 | 46.388 | 0.630 | 5.387 | 0.443 | 1.406 | 0.776 |
| TTTQDWHRIAQTGWA | 323 | 46.347 | 0.630 | 8.971 | 0.738 | 1.648 | 0.909 |
| TNTQDWHRIGQTGWA | 324 | 44.796 | 0.609 | 8.983 | 0.739 | 0.869 | 0.479 |
| TNNQDWHRIAQTGGV | 325 | 44.306 | 0.602 | 1.098 | 0.090 | 0.447 | 0.247 |
| SYTQDWHRIAQTGWV | 326 | 43.694 | 0.594 | 6.276 | 0.516 | 2.302 | 1.271 |
| TNTEDWHRIAQTGWA | 327 | 42.000 | 0.571 | 1.916 | 0.158 | 0.898 | 0.496 |
| TYTQDWHRIAQTGWG | 328 | 41.959 | 0.570 | 6.335 | 0.521 | 0.511 | 0.282 |
| TNNQDWHSIAQTGWV | 329 | 41.939 | 0.570 | 1.908 | 0.157 | 0.353 | 0.195 |
| TNCQDWHRIAQTGWV | 330 | 41.837 | 0.568 | 5.317 | 0.437 | 1.027 | 0.567 |
| TNTQDWHRMAQTGWA | 331 | 40.816 | 0.554 | 3.509 | 0.289 | 1.323 | 0.730 |
| SSTQDWHRIAQTGWV | 332 | 39.796 | 0.541 | 1.253 | 0.103 | 1.016 | 0.561 |
| TYTQDWHRIAQTGWV | 225 | 39.714 | 0.540 | 6.574 | 0.541 | 1.335 | 0.737 |
| TNTQDWHRIANTGWV | 239 | 39.673 | 0.539 | 6.450 | 0.530 | 1.253 | 0.691 |
| TYTQDWHRTAQTGWV | 333 | 39.143 | 0.532 | 5.309 | 0.437 | 1.614 | 0.891 |
| TYTQDWHRVAQTGWV | 334 | 38.776 | 0.527 | 5.233 | 0.430 | 0.616 | 0.340 |
| SNTQDWHRIAQTGWD | 335 | 37.612 | 0.511 | 3.097 | 0.255 | 0.394 | 0.217 |
| TVTQDWHRIAQTGWV | 336 | 36.776 | 0.500 | 7.408 | 0.609 | 3.253 | 1.795 |
| QNTQDWHRIAQTGWV | 337 | 25.469 | 0.346 | 13.394 | 1.102 | 2.073 | 1.144 |
| TNTQDWHRIPQTGWV | 244 | 33.735 | 0.458 | 12.324 | 1.014 | 1.295 | 0.715 |
| TNSQDWHRIPQTGWV | 339 | 27.531 | 0.374 | 11.380 | 0.936 | 0.405 | 0.223 |
| TNTQDWHRIAQPGWG | 340 | 7.612 | 0.103 | 11.170 | 0.919 | 0.502 | 0.277 |
| TNTQDWHRVAQTGWD | 341 | 8.306 | 0.113 | 10.221 | 0.841 | 1.089 | 0.601 |
| TNTEDWHRIAQTGWG | 342 | 25.673 | 0.349 | 10.085 | 0.829 | 0.442 | 0.244 |
| TTVQDWHRIAQTGWV | 219 | 114.673 | 1.558 | 27.218 | 2.239 | | |
| TNTQDWHRINQTGWV | 265 | 91.776 | 1.247 | 14.651 | 1.205 | | |
| TNTQDWHRIYQTGWV | 263 | 55.571 | 0.755 | 15.477 | 1.273 | | |
| TNTPDWHRIAQTGWV | 264 | 17.286 | 0.235 | 5.269 | 0.433 | | |

[0989] Table 16 provides the sequences of TTJ-001 capsid variants with an RPM greater than or equal to 1 in the original virus stock, a CV value of less than or equal to 1 and a fold-change in the brain of cynomolgus macaques of greater than 50 relative to AAV9. Approximately 59 variants were identified using the first maturation approach with a fold change above the TTJ-001 non-matured control in the brain of cynomolgus macaques. Approximately 181 variants were identified using the second maturation approach with a fold change above the TTJ-001 non-matured control in the brain of cynomolgus macaques. Many of the variants with increased expression in the brain of cynomolgus macaques relative to AAV9 and the non-matured TTJ-001 controls comprised a K at position 585 numbered according to SEQ ID NO: 981 or 138.

TABLE 16
NGS fold-enrichment of TTJ-001 in the brain of cynomolgus macaques
by both maturation approaches

| | | | |
|---|---|---|---|
| | | Fold | Fold |
| | | change | change |
| | SEQ | relative | relative |
| | ID | to | to |
| Sequence | NO: | AAV9 | TTJ-001 |

First Maturation Approach

| | | | |
|---|---|---|---|
| TNTKDWHRIAQTGWV | 202 | 104073.7 | 1198.899 |
| TNNQDWHRIAQTGWV | 203 | 5142.077 | 59.23527 |
| SNNQDWHRIAQTGWV | 271 | 2083.962 | 24.00665 |
| TNKQDWHRIAQTGWV | 539 | 2062.769 | 23.76252 |
| TNNEDWHRIAQTGWV | 540 | 428.3846 | 4.934869 |
| SNKQDWHRIAQTGWV | 541 | 372.0385 | 4.285778 |
| SNTQDWHRIAQTGWV | 204 | 328.3077 | 3.782012 |
| TTNQDWHRIAQTGWV | 205 | 276.0769 | 3.180328 |
| TNDQDWHRIAQTGWV | 542 | 274.6538 | 3.163934 |
| TNTKDRHRIAQTGWV | 543 | 265.9615 | 3.063802 |
| TTIQDWHRIAQTGWV | 206 | 260.2308 | 2.997785 |
| RNTQDWHRIAQTGWV | 544 | 242.5769 | 2.794417 |
| TNTKDSHRIAQTGWV | 545 | 238.7308 | 2.750111 |
| TTKQDWHRIAQTGWV | 546 | 221.8077 | 2.555162 |
| TTSQDWHRIAQTGWV | 207 | 210.0769 | 2.420027 |
| TTDQDWHRIAQTGWV | 547 | 204.7308 | 2.35844 |
| TNTKDLHRIAQTGWV | 548 | 199.8846 | 2.302614 |
| TNPSDWHRIAQTGWV | 549 | 181.500 | 2.090829 |
| TNKEDWHRIAQTGWV | 550 | 174.4231 | 2.009304 |
| TTTQDWHRIAQTGWV | 208 | 169.5769 | 1.953478 |
| TGKQDWHRIAQTGWV | 551 | 168.9615 | 1.946389 |
| TTAQDWHRIAQTGWV | 209 | 164.4615 | 1.89455 |
| TVKQDWHRIAQTGWV | 210 | 160.3077 | 1.846699 |
| TNNQDWQRIAQTGWV | 304 | 154.0385 | 1.774479 |
| TNYQDWHRIAQTGWV | 552 | 153.7692 | 1.771378 |
| TNTPDWHRIAQTGWV | 264 | 150.1923 | 1.730173 |
| STKQDWHRIAQTGWV | 553 | 148.3846 | 1.709349 |
| TNTQDWHRIAQTGWA | 211 | 147.6923 | 1.701374 |
| TNTQDWHRIAGTGWV | 212 | 146.2308 | 1.684537 |
| TNTQDWHRIAQTNWS | 554 | 137.6923 | 1.586176 |
| TTEQDWHRIAQTGWV | 555 | 134.2308 | 1.5463 |
| TSKQDWHRIAQTGWV | 556 | 134.1154 | 1.544971 |
| TNIQDWHRIAQTGWV | 213 | 132.4231 | 1.525476 |
| TNTQDWHRIAGSNWV | 214 | 122.1154 | 1.406735 |
| TNTQDWHRIAGTNWV | 215 | 122.0769 | 1.406292 |
| TNTQDWHRIAQTNWI | 557 | 120.2692 | 1.385467 |
| TNTQDWHRIYQTGWV | 263 | 117 | 1.347807 |
| TYNQDWHRIAQTGWV | 281 | 116.0769 | 1.337173 |
| TNTQDWHRVPQTGWV | 216 | 110.9615 | 1.278245 |
| TNTQDWHRIANNNWV | 262 | 109.0385 | 1.256092 |
| TNTQDWHRIAQTNWV | 217 | 106.3462 | 1.225078 |
| STIQDWHRIAQTGWV | 218 | 106.0769 | 1.221976 |
| TTVQDWHRIAQTGWV | 219 | 105.9615 | 1.220647 |
| TGTQDWHRIAQTGWV | 220 | 105.7692 | 1.218432 |
| TNTQDWHRINQTGWV | 265 | 104.9615 | 1.209127 |
| TNNQEWHRIAQTGWV | 558 | 101.1538 | 1.165264 |
| TNTRDWHRIAQTGWV | 221 | 101 | 1.163491 |
| TNTQDWHRIAQTGWS | 307 | 100.1923 | 1.154187 |
| TNTQDWHRVNQTGWV | 222 | 98.15385 | 1.130704 |
| TTLQDWHRIAQTGWV | 286 | 96.69231 | 1.113868 |
| TNTQDWHRIANSNWV | 559 | 96.53846 | 1.112096 |
| TNTQDWHRIAQTGWI | 223 | 94.69231 | 1.090829 |
| TTMQDWHRIAQTGWV | 560 | 93.11538 | 1.072663 |
| ANNQDWHRIAQTGWV | 561 | 91.26923 | 1.051396 |
| SNIQDWHRIAQTGWV | 224 | 90.84615 | 1.046522 |
| TKNQDWHRIAQTGWV | 562 | 90.69231 | 1.04475 |
| TYTQDWHRIAQTGWV | 225 | 90.19231 | 1.03899 |
| TNKSDWHRIAQTGWV | 563 | 89.92308 | 1.035888 |
| TNTQDWHRVYQTGWV | 564 | 86.96154 | 1.001772 |
| TNTQDWHRIAQTGWV | 201 | 86.80769 | 1 |
| TNTQDWHRIAQTGWC | 302 | 84.5 | 0.973416 |
| SNTEDWHRIAQTGWV | 565 | 82.23077 | 0.947275 |
| TNTEDWHRIAQTGWV | 226 | 82.07692 | 0.945503 |
| TNIEDWHRIAQTGWV | 227 | 81.46154 | 0.938414 |
| TTRQDWHRIAQTGWV | 566 | 81.23077 | 0.935755 |
| TNTQDWHRVANTGWV | 567 | 78.80769 | 0.907842 |
| TNTQDWHRISGTGWV | 228 | 77.07692 | 0.887904 |
| TNSQDWHRIAQTGWV | 229 | 73.23077 | 0.843598 |
| TNHQSAQAQAQTGWV | 200 | 1 | 0.01152 |

Second Maturation Approach

| | | | |
|---|---|---|---|
| TYTKDWHRIAQTGWV | 568 | 39542.980 | 537.179 |
| TNTKDWHRIAQTGWV | 202 | 33375.082 | 453.390 |
| TTTKDWHRIAQTGWV | 268 | 25769.367 | 350.069 |
| TNIKDWHRIAQTGWV | 269 | 24409.245 | 331.592 |
| TNTKDWHRISQTGWV | 569 | 21847.571 | 296.793 |
| SNTKDWHRIAQTGWV | 570 | 15438.020 | 209.721 |
| TNNKDWHRIAQTGWV | 571 | 14378.939 | 195.334 |
| TNSKDWHRIAQTGWV | 572 | 12740.796 | 173.080 |
| TSTKDWHRIAQTGWV | 270 | 12410.469 | 168.592 |
| TNTKDWHRVAQTGWV | 4680 | 10573.939 | 143.644 |
| TITKDWHRIAQTGWV | 573 | 9400.980 | 127.709 |
| TNTKDWHRIAQTGWG | 574 | 6661.061 | 90.488 |
| SNKQDWHRIAQTGWV | 541 | 4260.143 | 57.873 |
| INTKDWHRIAQTGWV | 575 | 3926.816 | 53.345 |
| TNAKDWHRIAQTGWV | 576 | 3924.163 | 53.309 |
| TNKQDWHRIAQTGWV | 539 | 3600.776 | 48.915 |
| TNTKDWHRITQTGWV | 577 | 3002.204 | 40.784 |
| SNNQDWHRIAQTGWV | 271 | 2542.510 | 34.539 |
| TNTKDWHRTAQTGWV | 578 | 2383.510 | 32.379 |
| TKTKDWHRIAQTGWV | 579 | 2025.184 | 27.512 |
| STNQDWHRIAQTGWV | 580 | 1985.184 | 26.968 |
| TNTKDWHRIAQSGWV | 581 | 1846.837 | 25.089 |
| TNTKDWHRIAQPGWV | 582 | 1696.184 | 23.042 |
| TNTKDWHRMAQTGWV | 583 | 1681.082 | 22.837 |
| TNTKDWHRSAQTGWV | 584 | 1647.714 | 22.384 |
| TNTKDWHRIGQTGWV | 585 | 1618.429 | 21.986 |
| TNTKDWHRIAQTGSV | 586 | 1599.571 | 21.730 |
| TNTKDWHRIEQTGWV | 587 | 1590.959 | 21.613 |
| ANTKDWHRIAQTGWV | 588 | 1565.184 | 21.263 |
| RNNQDWHRIAQTGWV | 589 | 1495.755 | 20.319 |
| TNTKDWHKIAQTGWV | 590 | 1405.082 | 19.088 |
| TNTKDWLRIAQTGWV | 591 | 1405.041 | 19.087 |
| TNTKDWHRIVQTGWV | 592 | 1352.265 | 18.370 |
| TNNQDWHRIAQTGWV | 203 | 1335.286 | 18.139 |
| TNNQDWHRIAQTGWA | 272 | 1313.633 | 17.845 |
| TTNQDWHRIAQTGWV | 205 | 1301.776 | 17.684 |
| TNNQDWHRISQTGWV | 273 | 1283.327 | 17.434 |
| TNNQDWHRVAQTGWV | 274 | 1237.306 | 16.808 |
| TNTKDWHRNAQTGWV | 593 | 1228.306 | 16.686 |
| TNTKEWHRIAQTGWV | 594 | 1144.388 | 15.546 |
| TNTKDWHRIAQTDWV | 595 | 1132.163 | 15.380 |
| TNTKDWHRIAQTGCV | 596 | 1118.531 | 15.195 |
| TNTKDWQRIAQTGWV | 597 | 1042.082 | 14.156 |
| TGNQDWHRIAQTGWV | 598 | 1024.367 | 13.916 |
| TNNEDWHRIAQTGWV | 540 | 985.776 | 13.391 |
| TNTKDWHRLAQTGWV | 599 | 903.531 | 12.274 |
| TNDQDWHRIAQTGWV | 542 | 900.204 | 12.229 |
| TNTKDWNRIAQTGWV | 600 | 867.490 | 11.785 |
| TNYQDWHRIAQTGWV | 552 | 860.408 | 11.688 |
| TNNQDWHRIAQTGWI | 601 | 857.367 | 11.647 |
| TNNQDWHRIANTGWV | 602 | 795.592 | 10.808 |
| TNTKDWHRIAKTGWV | 603 | 728.204 | 9.892 |
| TNTKDWHRIAHTGWV | 604 | 726.347 | 9.867 |
| TNTKDWHRIAQTGRV | 605 | 694.367 | 9.433 |
| TSNQDWHRIAQTGWV | 276 | 691.816 | 9.398 |
| TNTKDWHRIAQTGLV | 606 | 675.531 | 9.177 |
| TNTKDWHRIAQTGGV | 607 | 668.612 | 9.083 |
| TNTKDWHRIAQAGWV | 608 | 653.143 | 8.873 |
| TNNQDWHRIPQTGWV | 277 | 653.020 | 8.871 |
| TNTKDWHTIAQTGWV | 609 | 627.694 | 8.527 |
| THTKDWHRIAQTGWV | 610 | 614.735 | 8.351 |
| TNTKDWHRIAQIGWV | 611 | 612.653 | 8.323 |
| TNNQDWHRIAQTGWD | 278 | 597.592 | 8.118 |
| TDTKDWHRIAQTGWV | 612 | 596.000 | 8.096 |
| TNTKDWHRIAQNGWV | 613 | 588.612 | 7.996 |
| TNTKDWHRIARTGWV | 614 | 587.816 | 7.985 |
| TNTKDWHSIAQTGWV | 615 | 549.510 | 7.465 |
| TNNQDWHRIAQTGWG | 616 | 537.082 | 7.296 |
| TNTKDSHRIAQTGWV | 545 | 526.327 | 7.150 |
| TNEQDWHRIAQTGWV | 617 | 511.755 | 6.952 |
| CNTQDWHRIAQTGWV | 618 | 511.633 | 6.950 |
| TTNQDWHRIAQSGWV | 619 | 479.388 | 6.512 |
| TNPKDWHRIAQTGWV | 620 | 467.224 | 6.347 |
| TNTKDLHRIAQTGWV | 548 | 433.245 | 5.886 |
| TNTKDWHRIAETGWV | 621 | 431.939 | 5.868 |
| TNTKDWHRIALTGWV | 622 | 428.020 | 5.815 |
| TNNQDWHRIAQTGWF | 279 | 411.490 | 5.590 |
| TNTKDWHGIAQTGWV | 623 | 381.612 | 5.184 |
| TNTKDCHRIAQTGWV | 624 | 350.041 | 4.755 |
| INNQDWHRIAQTGWV | 280 | 342.551 | 4.653 |
| TYTEDWHRIAQTGWV | 625 | 320.429 | 4.353 |
| TNNQNWHRIAQTGWV | 626 | 299.531 | 4.069 |
| TYNQDWHRIAQTGWV | 281 | 299.327 | 4.066 |
| TNNQHWHRIAQTGWV | 627 | 263.571 | 3.581 |
| TNNQDWHRITQTGWV | 628 | 238.796 | 3.244 |
| TNRKTALHLAQTGWV | 629 | 234.857 | 3.190 |
| NNNQDWHRIAQTGWV | 630 | 227.776 | 3.094 |
| KNNQDWHRIAQTGWV | 631 | 221.327 | 3.007 |
| TNTKDGHRIAQTGWV | 632 | 217.143 | 2.950 |
| TNSQDWHRIAQTGWS | 633 | 205.082 | 2.786 |
| STIQDWHRIAQTGWV | 218 | 198.000 | 2.690 |
| TNNQDWHSIAHTGWV | 634 | 189.735 | 2.577 |
| TNTKDWPRIAQTGWV | 635 | 187.939 | 2.553 |
| TNNQDWHRIARTGWV | 636 | 186.408 | 2.532 |
| TNTKDRHSIAQTGWV | 637 | 180.449 | 2.451 |
| TNTKDRHRIAQTGWV | 543 | 174.041 | 2.364 |
| SNTQDWHRVPQTGWV | 638 | 172.735 | 2.347 |
| TNNQDWHRIAKTGWV | 639 | 171.694 | 2.332 |
| TTIQDWHRIAQTGWV | 206 | 168.531 | 2.289 |
| TNTKDWHRIAPTGWV | 640 | 160.204 | 2.176 |
| SNTQDWHRIAQTGWA | 641 | 154.224 | 2.095 |
| TNNRDWHRIAQTGWV | 642 | 150.102 | 2.039 |
| TNNQDWHRIAQTRWV | 643 | 148.388 | 2.016 |
| LNNQDWHRIAQTGWV | 644 | 148.204 | 2.013 |
| TINQDWHRIAQTGWV | 282 | 142.776 | 1.940 |
| TNNQDWHRIAHTGWV | 645 | 142.551 | 1.937 |
| TNNQDWHRIGQTGWV | 646 | 141.245 | 1.919 |
| TNTKDRQRIAQTGWV | 647 | 141.020 | 1.916 |
| TNNQDWYRIAQTGWV | 648 | 137.347 | 1.866 |
| TNNQDWHRIAQPGWV | 649 | 135.980 | 1.847 |
| TNNQGWHRIAQTGWV | 650 | 135.755 | 1.844 |
| SNNQDWHRIAQSGWV | 651 | 134.653 | 1.829 |
| SNIQDWHRIAQTGWV | 224 | 133.633 | 1.815 |
| TNNQDWHRFAQTGWV | 652 | 132.020 | 1.793 |
| SNNQDWHRMAQTGWV | 653 | 130.939 | 1.779 |
| TNHQDWHRIAQTGWV | 654 | 129.143 | 1.754 |
| STTQDWHRIAQTGWV | 230 | 122.041 | 1.658 |
| TNNQDWHRTAQTGWV | 655 | 121.612 | 1.652 |
| SNSQDWHRIAQTGWA | 656 | 120.041 | 1.631 |
| SNTQDWHRIAQTGWV | 204 | 119.367 | 1.622 |
| TNNQDWHRIAQTGRV | 657 | 118.327 | 1.607 |
| TNSKDGHRIAQTGWV | 658 | 115.265 | 1.566 |
| SNNQDWHKIAQTGWV | 659 | 115.061 | 1.563 |
| TNTKDWDRIAQTGWV | 660 | 114.184 | 1.551 |
| TNIQDWHRVAQTGWV | 283 | 111.469 | 1.514 |
| TNNQDWQRIAHTGWV | 661 | 109.755 | 1.491 |
| TNIQDWHRIAQTGWA | 284 | 109.082 | 1.482 |
| SNTQDWHRVAQTGWV | 285 | 108.653 | 1.476 |
| TTLQDWHRIAQTGWV | 286 | 106.367 | 1.445 |
| SNNQDWQRIAQTGWV | 662 | 106.245 | 1.443 |
| TNTNDLHRIAQTGWV | 663 | 105.367 | 1.431 |
| TNTQDWHTIAHTGWV | 664 | 99.388 | 1.350 |
| TNNQEWHRIAQTGWV | 558 | 97.918 | 1.330 |
| SNNQDWNRIAQTGWV | 665 | 97.122 | 1.319 |
| TNTQDWHKIAQTGWA | 666 | 96.469 | 1.311 |
| TNNQDWHRIAQSGWV | 667 | 95.388 | 1.296 |
| SNTQDWHRIAQTGWG | 288 | 94.020 | 1.277 |
| TNNQDWHTIAQTGWV | 668 | 93.980 | 1.277 |
| TNSQDWHRIAGTGWV | 669 | 93.776 | 1.274 |
| TTSQDWHRIAQTGWV | 207 | 93.306 | 1.268 |
| TNNQDWHKIAQTGWV | 289 | 92.265 | 1.253 |
| TTTQDWHRVAQTGWV | 290 | 89.898 | 1.221 |
| TNSQDWHRIAQTGWA | 291 | 89.245 | 1.212 |
| TNIQDWHRIAQTGWV | 213 | 89.224 | 1.212 |
| TNTQDWHRVPQTGWV | 216 | 89.041 | 1.210 |
| SNTQDWHRISQTGWV | 292 | 88.245 | 1.199 |
| SNSQDWHRVAQTGWV | 670 | 88.163 | 1.198 |
| TNNQDVHRIAQTGWV | 671 | 87.816 | 1.193 |
| SNTQDWHRIAGTGWV | 672 | 87.041 | 1.182 |
| TNSQDWHRVAQTGWV | 293 | 86.367 | 1.173 |
| TNNQDWHRSAQTGWV | 673 | 86.224 | 1.171 |
| SNNQDGHRIAQTGWV | 674 | 86.163 | 1.171 |
| ANNQDWQRIAQTGWV | 675 | 86.082 | 1.169 |
| STSQDWHRIAQTGWV | 248 | 85.939 | 1.167 |
| TNNQDWLRIAQTGWV | 676 | 85.082 | 1.156 |
| ANNQDWHRIAQTGWV | 561 | 84.980 | 1.154 |
| TNTQDWHRISGTGWV | 228 | 84.633 | 1.150 |
| TNTQDWHRIAGTGWV | 212 | 84.469 | 1.147 |
| TNNQDWRRIAQTGWV | 677 | 83.143 | 1.129 |
| TNNQDWHWIAQTGWV | 678 | 83.102 | 1.129 |
| TNNQDWHRMAQTGWV | 679 | 82.571 | 1.122 |
| TNNQDWHRLAQTGWV | 680 | 81.612 | 1.109 |
| SNTQDWHRIAQTGWI | 681 | 80.469 | 1.093 |
| TNNQDWHRIAQTVWV | 682 | 80.429 | 1.093 |
| TNIQDWHRISQTGWV | 294 | 79.510 | 1.080 |
| TNTQDWHRIPQTGWA | 683 | 79.265 | 1.077 |
| TNKQDGHRIAQTGWV | 684 | 79.041 | 1.074 |
| TNTQDWHRTAQTGWA | 685 | 77.980 | 1.059 |
| TNIQDWHRIAQTGWI | 686 | 77.755 | 1.056 |
| TKNQDWHRIAQTGWV | 562 | 77.694 | 1.055 |
| TYIQDWHRIAQTGWV | 295 | 77.102 | 1.047 |
| TNNQDWHRIAQTGCV | 687 | 77.061 | 1.047 |
| TNNQDWHRIVQTGWV | 688 | 77.061 | 1.047 |
| TNNQDWHRIAQTGWL | 689 | 76.776 | 1.043 |
| TNNQDWHRIAQTAWV | 690 | 76.265 | 1.036 |
| TTTQDWHRIAQTGWV | 208 | 75.980 | 1.032 |
| TNNQDWHRNAQTGWV | 296 | 75.898 | 1.031 |
| TNNQDRHGIAQTGWV | 691 | 75.367 | 1.024 |
| SGTQDWHRIAQTGWV | 692 | 75.000 | 1.019 |
| THNQDWHRIAQTGWV | 693 | 74.551 | 1.013 |
| TNSQDWHTIAHTGWV | 694 | 74.510 | 1.012 |
| TNTQDWHRIAQTGWV | 201 | 73.612 | 1.000 |
| SNNQDWHRIAQTGGV | 695 | 73.429 | 0.998 |
| TITQDWHRVAQTGWV | 297 | 72.612 | 0.986 |
| TNNQDSHRIAQTGWV | 298 | 72.286 | 0.982 |
| TNTEDWHRVAQTGWV | 299 | 70.939 | 0.964 |
| TNNQDGHRIAQSGWV | 696 | 70.857 | 0.963 |
| TNNQDWHRIAQNGWV | 697 | 70.776 | 0.961 |
| TNNQDSQRIAQTGWV | 698 | 70.469 | 0.957 |
| TTTQDWHRIPQTGWV | 300 | 69.959 | 0.950 |
| RNTQDWHRIAQTGWV | 544 | 69.776 | 0.948 |
| SNNQDWHRIAQTGSV | 699 | 69.388 | 0.943 |
| TNSQDWHRIAQTNWV | 700 | 68.469 | 0.930 |
| SNNQDWHRIAETGWV | 701 | 68.306 | 0.928 |
| TSTQDWHRIAQTGWA | 301 | 67.816 | 0.921 |
| TNTQDWHRVAQTGWV | 232 | 67.265 | 0.914 |
| SNNQDSHRIAQTGWV | 702 | 66.776 | 0.907 |
| TNIQDWHRIANTGWV | 703 | 66.673 | 0.906 |
| TNSNDWHRIAQTGWV | 704 | 66.367 | 0.902 |
| SNSQDWHRIAQTGWV | 249 | 66.347 | 0.901 |
| TNTQDWHRIAQTGWC | 302 | 66.163 | 0.899 |
| TNTQDWHRSAQTGWA | 303 | 65.796 | 0.894 |
| TNNQDWQRIAQTGWV | 304 | 65.449 | 0.889 |
| TNIQDWHRIPQTGWV | 305 | 64.918 | 0.882 |
| TTTQDWHRIAQTGWI | 306 | 64.755 | 0.880 |
| SNTQDWHRIANTGWV | 705 | 64.592 | 0.877 |
| TNTQDWHRIAQTGWA | 211 | 64.531 | 0.877 |
| TNTQDWHRIAQTNWV | 217 | 64.531 | 0.877 |
| TNTQDWHRISQTGWV | 236 | 64.408 | 0.875 |
| TNNQHWQRIAQTGWV | 706 | 64.306 | 0.874 |
| TYNQDWQRIAQTGWV | 707 | 63.918 | 0.868 |
| TNNQDWHRIEQTGWV | 708 | 63.408 | 0.861 |
| TNNQDWHRIAQTSWV | 709 | 62.551 | 0.850 |
| RNTQDWHRISQTGWV | 710 | 61.429 | 0.834 |
| TNTQDWHTIAQTGWA | 711 | 61.327 | 0.833 |
| TNTQDWHRIAQTGWS | 307 | 61.061 | 0.829 |
| TNQQDWHRIAQTGWV | 712 | 60.796 | 0.826 |
| RNIQDWHRIAQTGWV | 713 | 60.755 | 0.825 |
| TTTQDWHRISQTGWV | 308 | 60.571 | 0.823 |
| TSTQDWHRVAQTGWV | 309 | 60.020 | 0.815 |
| TSTQDWHRVSQTGWV | 714 | 59.490 | 0.808 |
| TNSQDWHKIAQTGWA | 310 | 58.653 | 0.797 |
| TNKQDWHRIEQTGWV | 715 | 58.612 | 0.796 |
| TNNPDWHRIAQTGWV | 716 | 58.143 | 0.790 |
| SNNQDWHRIAQAGWV | 717 | 58.041 | 0.788 |
| TNNQDYHRIAQTGWV | 718 | 57.755 | 0.785 |
| TITEDWHRIAQTGWV | 719 | 57.694 | 0.784 |
| TNIEDWHRIAQTGWV | 227 | 57.184 | 0.777 |
| TNTNDWHRIAQTGWV | 720 | 57.163 | 0.777 |
| TNNQDWHRIAQTDWV | 721 | 56.837 | 0.772 |
| SNTEDWHRIAQTGWV | 565 | 56.306 | 0.765 |
| TNIQDWHRIAQTGWD | 311 | 56.224 | 0.764 |
| SNTQDWHRIPQTGWV | 722 | 55.939 | 0.760 |
| TNNQDWHRIAQTGSV | 723 | 55.571 | 0.755 |
| SNNQDRHRIAQTGWV | 724 | 55.469 | 0.754 |
| TNTQDWHRIAQTGWI | 223 | 55.306 | 0.751 |
| TNNQDWQRISQTGWV | 725 | 55.286 | 0.751 |
| TNNQDWKRIAQTGWV | 726 | 54.918 | 0.746 |
| TNNEDRHRIAQTGWV | 727 | 54.429 | 0.739 |
| STTQDWHRISQTGWV | 728 | 54.102 | 0.735 |
| TYTQDWHKIAQTGWV | 312 | 53.878 | 0.732 |
| TFSQDWHRIAQTGWV | 729 | 53.776 | 0.731 |
| TYTQDWHRIAQTGWA | 313 | 53.633 | 0.729 |
| RNSQDWHRIAQTGWV | 730 | 53.592 | 0.728 |
| INTQDWHRIAQTGWA | 731 | 53.571 | 0.728 |
| TNNQDRHRIAQTGWV | 732 | 53.408 | 0.726 |
| RNTEDWHRIAQTGWV | 733 | 53.204 | 0.723 |
| TNNQDWHRIAQIGWV | 734 | 53.143 | 0.722 |
| TNNHDWHRIAQTGWV | 735 | 53.041 | 0.721 |
| TNSQDWHRIAQTGWV | 229 | 52.959 | 0.719 |
| TNTQDWHRISQTGWA | 314 | 52.939 | 0.719 |
| TNTEDWHRIAQTGWV | 226 | 52.469 | 0.713 |
| SNTQDWHRVSQTGWV | 736 | 52.408 | 0.712 |
| TNMQDWHRIAQTGWV | 315 | 52.143 | 0.708 |
| TNSQDWHRVPQTGWV | 737 | 52.041 | 0.707 |
| RTTQDWHRIAQTGWV | 738 | 51.939 | 0.706 |
| TGTQDWHRIAQTGWV | 220 | 51.755 | 0.703 |
| TNYQDWQRIAQTGWV | 739 | 51.327 | 0.697 |
| SNIEDWHRIAQTGWV | 740 | 50.776 | 0.690 |
| TNTQDWHRIAQTGWT | 316 | 50.612 | 0.688 |
| TNNQDRHSIAQTGWV | 741 | 50.408 | 0.685 |
| TITQDWHRTAQTGWV | 317 | 50.143 | 0.681 |
| RNTQDWHRIAQTGWA | 742 | 50.082 | 0.680 |
| TNNQDGHRIAQTGSV | 743 | 50.061 | 0.680 |
| TNHQSAQAQAQTGWV | 200 | 1.000 | 0.014 |

[0990] These data demonstrate that following two maturation approaches, matured TTJ-001 capsid variants (AAV9 capsid variants) with loop VIII modifications were generated with significantly enhanced CNS tropism over wild-type AAV9 controls in two species of NHPs (cynomolgus macaques (Macaca fascicularis) and marmosets (Callithrix jacchus)) and mice, as well as cross-species compatibility.

### Example 5. Individual Capsid Characterization in Mice

[0991] The goal of these experiments was to determine the transduction level, tropism, ability to cross the blood brain barrier, and overall spatial distribution in the central nervous system (CNS) of a capsid variant selected from the study described in Example 1 relative to AAV9 following intravenous injection in BALB/c mice. The capsid variant was TTJ-001 (SEQ ID NO: 981 (amino acid) and 983 (DNA), comprising SEQ ID NO: 941 or 201), as outlined in Table 3 above. The amino acid and DNA sequences of TTJ-001 are provided, e.g., in Tables 4 and 5, respectively.

[0992] AAV particles were generated with this capsid variant encapsulating a luciferase-EGFP-HA tagged reporter gene driven by a CBA promoter encoded by a single stranded viral genome. The TTJ-001 capsid variant and AAV9 control were tested by intravenously administering the AAV particle formulation at 2e13 VG/kg (5e11/dose) to mice (n=3). The in-life period was 28 days and the brain and the liver were collected for measuring transgene mRNA, transgene protein, and viral DNA (biodistribution).

[0993] At 27 days post-injection of the AAV particles encapsulated in the TTJ-001 capsid variant, mice were injected with luciferin and imaged on the ventral and dorsal side by the IVIS imager. Robust luciferase signal was observed in mice injected with AAV particles encapsulated in the AAV9 control capsid but less luciferase signal was observed in mice injected with the AAV particles encapsulated in the TTJ-001 capsid variant.

[0994] The brains and livers were isolated on day 28 and subsequently assayed by qPCR for the presence of transgene mRNA, as a measure of transgene expression. Data were provided as average mRNA fold change for the transgene relative to a housekeeping gene as well as the fold change relative to the AAV9 control (Table 24). As shown in Table 24, mRNA expression from the TTJ-001 capsid variant was slightly increased in the brain of the mice relative to the AAV9 control. More specifically, mRNA expression was approximately 1.3-fold higher from the TTJ-001 capsid variant compared to wild-type AAV9 in the brain of the mice. In the liver, mRNA expression from the TTJ-001 capsid variant was decreased relative to the AAV9 control.

TABLE 24
Transgene mRNA expression with the TTJ-001 capsid
variant in the brain and liver of mice

| | | AVG transgene mRNA | |
|---|---|---|---|
| Capsid | | fold change relative | Fold change |
| Variant | Tissue | to housekeeping gene | relative to AAV9 |
| AAV9 | Brain | 0.544 | 1.0 |
| | Liver | 8.938 | 1.0 |
| TTJ-001 | Brain | 0.734 | 1.349 |
| | Liver | 4.9999 | 0.559 |

[0995] The brains and livers isolated from the mice on day 28 were also assayed for the presence of viral DNA by qPCR as a measure of viral genome levels. Data are provided in Table 25 as average DNA (viral genome (VG) copies per diploid genome (dg) as well as fold change relative to the AAV9 control. As shown in Table 25, biodistribution of TTJ-001, was slightly higher in the mouse brain relative to the wild-type AAV9 control. Biodistribution of TTJ-001 was lower in the mouse liver relative to the wild-type AAV9 control.

TABLE 25
Viral DNA biodistribution with the TTJ-001 capsid
variant in the brain and liver of mice

| Capsid | | AVG VG per | Fold change |
|---|---|---|---|
| Variant | Tissue | diploid cell | relative to AAV9 |
| AAV9 | Brain | 0.141 | 1.0 |
| | Liver | 32.224 | 1.0 |
| TTJ-001 | Brain | 0.375 | 2.650 |
| | Liver | 6.056 | 0.188 |

[0996] The brain, heart, liver, and muscle tissue isolated from the mice on day 28 were also subjected to immunohistochemistry staining to evaluate overall tropism in the CNS and peripheral tissues and transgene expression. TTJ-001 showed comparable staining in the brain, muscle, and liver, as compared to the AAV9 control. Additionally, TTJ-001 demonstrated decreased staining in the heart relative to AAV9.

The application's sequence listing, which the Patent Office published only in electronic form, follows.

SEQUENCE LISTING (5123 sequences)

SEQ ID NO: 1 - protein, 743 aa, Adeno-associated virus
MAADGYLPDWLEDNLSEGIREWWALKPGAPQPKANQQHQDNARGLVLPGYKYLGPGNGLDKGEPVNAADAAALEHDKAYDQQLKAGDNPYLKYNHADAEFQERLKEDTSFGGNLGRAVFQAKKRLLEPLGLVEEAAKTAPGKKRPVEQSPQEPDSSAGIGKSGAQPAKKRLNFGQTGDTESVPDPQPIGEPPAAPSGVGSLTMASGGGAPVADNNEGADGVGSSSGNWHCDSQWLGDRVITTSTRTWALPTYNNHLYKQISNSTSGGSSNDNAYFGYSTPWGYFDFNRFHCHFSPRDWQRLINNNWGFRPKRLNFKLFNIQVKEVTDNNGVKTIANNLTSTVQVFTDSDYQLPYVLGSAHEGCLPPFPADVFMIPQYGYLTLNDGSQAVGRSSFYCLEYFPSQMLRTGNNFQFSYEFENVPFHSSYAHSQSLDRLMNPLIDQYLYYLSKTINGSGQNQQTLKFSVAGPSNMAVQGRNYIPGPSYRQQRVSTTVTQNNNSEFAWPGASSWALNGRNSLMNPGPAMASHKEGEDRFFPLSGSLIFGKQGTGRDNVDADKVMITNEEEIKTTNPVATESYGQVATNHQSDGTLAVPFKAQAQTGWVQNQGILPGMVWQDRDVYLQGPIWAKIPHTDGNFHPSPLMGGFGMKHPPPQILIKNTPVPADPPTAFNKDKLNSFITQYSTGQVSVEIEWELQKENSKRWNPEIQYTSNYYKSNNVEFAVNTEGVYSEPRPIGTRYLTRNL

SEQ ID NO: 2-10 - skipped (9 entries)

SEQ ID NO: 11 - protein, 736 aa, synthetic construct
MAADGYLPDWLEDNLSEGIREWWALKPGAPQPKANQQHQDNARGLVLPGYKYLGPGNGLDKGEPVNAADAAALEHDKAYDQQLKAGDNPYLKYNHADAEFQERLKEDTSFGGNLGRAVFQAKKRLLEPLGLVEEAAKTAPGKKRPVEQSPQEPDSSAGIGKSGAQPAKKRLNFGQTGDTESVPDPQPIGEPPAAPSGVGSLTMASGGGAPVADNNEGADGVGSSSGNWHCDSQWLGDRVITTSTRTWALPTYNNHLYKQISNSTSGGSSNDNAYFGYSTPWGYFDFNRFHCHFSPRDWQRLINNNWGFRPKRLNFKLFNIQVKEVTDNNGVKTIANNLTSTVQVFTDSDYQLPYVLGSAHEGCLPPFPADVFMIPQYGYLTLNDGSQAVGRSSFYCLEYFPSQMLRTGNNFQFSYEFENVPFHSSYAHSQSLDRLMNPLIDQYLYYLSRTINGSGQNQQTLKFSVAGPSNMAVQGRNYIPGPSYRQQRVSTTVTQNNNSEFAWPGASSWALNGRNSLMNPGPAMASHKEGEDRFFPLSGSLIFGKQGTGRDNVDADKVMITNEEEIKTTNPVATESYGQVATNHQSAQAQAQTGWVQNQGILPGMVWQDRDVYLQGPIWAKIPHTDGNFHPSPLMGGFGMKHPPPQILIKNTPVPADPPTAFNKDKLNSFITQYSTGQVSVEIEWELQKENSKRWNPEIQYTSNYYKSNNVEFAVNTEGVYSEPRPIGTRYLTRNL

SEQ ID NO: 12-136 - skipped (125 entries)

SEQ ID NO: 137 - DNA, 2211 bp, Adeno-associated virus 9
  source 1..2211: mol_type = genomic DNA
atggctgccgatggttatcttccagattggctcgaggacaaccttagtgaaggaattcgcgagtggtgggctttgaaacctggagcccctcaacccaaggcaaatcaacaacatcaagacaacgctcgaggtcttgtgcttccgggttacaaataccttggacccggcaacggactcgacaagggggagccggtcaacgcagcagacgcggcggccctcgagcacgacaaggcctacgaccagcagctcaaggccggagacaacccgtacctcaagtacaaccacgccgacgccgagttccaggagcggctcaaagaagatacgtcttttgggggcaacctcgggcgagcagtcttccaggccaaaaagaggcttcttgaacctcttggtctggttgaggaagcggctaagacggctcctggaaagaagaggcctgtagagcagtctcctcaggaaccggactcctccgcgggtattggcaaatcgggtgcacagcccgctaaaaagagactcaatttcggtcagactggcgacacagagtcagtcccagaccctcaaccaatcggagaacctcccgcagccccctcaggtgtgggatctcttacaatggcttcaggtggtggcgcaccagtggcagacaataacgaaggtgccgatggagtgggtagttcctcgggaaattggcattgcgattcccaatggctgggggacagagtcatcaccaccagcacccgaacctgggccctgcccacctacaacaatcacctctacaagcaaatctccaacagcacatctggaggatcttcaaatgacaacgcctacttcggctacagcaccccctgggggtattttgacttcaacagattccactgccacttctcaccacgtgactggcagcgactcatcaacaacaactggggattccggcctaagcgactcaacttcaagctcttcaacattcaggtcaaagaggttacggacaacaatggagtcaagaccatcgccaataaccttaccagcacggtccaggtcttcacggactcagactatcagctcccgtacgtgctcgggtcggctcacgagggctgcctcccgccgttcccagcggacgttttcatgattcctcagtacgggtatctgacgcttaatgatggaagccaggccgtgggtcgttcgtccttttactgcctggaatatttcccgtcgcaaatgctaagaacgggtaacaacttccagttcagctacgagtttgagaacgtacctttccatagcagctacgctcacagccaaagcctggaccgactaatgaatccactcatcgaccaatacttgtactatctctcaaagactattaacggttctggacagaatcaacaaacgctaaaattcagtgtggccggacccagcaacatggctgtccagggaagaaactacatacctggacccagctaccgacaacaacgtgtctcaaccactgtgactcaaaacaacaacagcgaatttgcttggcctggagcttcttcttgggctctcaatggacgtaatagcttgatgaatcctggacctgctatggccagccacaaagaaggagaggaccgtttctttcctttgtctggatctttaatttttggcaaacaaggaactggaagagacaacgtggatgcggacaaagtcatgataaccaacgaagaagaaattaaaactactaacccggtagcaacggagtcctatggacaagtggccacaaaccaccagagtgcccaagcacaggcgcagaccggctgggttcaaaaccaaggaatacttccgggtatggtttggcaggacagagatgtgtacctgcaaggacccatttgggccaaaattcctcacacggacggcaactttcacccttctccgctgatgggagggtttggaatgaagcacccgcctcctcagatcctcatcaaaaacacacctgtacctgcggatcctccaacggccttcaacaaggacaagctgaactctttcatcacccagtattctactggccaagtcagcgtggagatcgagtgggagctgcagaaggaaaacagcaagcgctggaacccggagatccagtacacttccaactattacaagtctaataatgttgaatttgctgttaatactgaaggtgtatatagtgaaccccgccccattggcaccagatacctgactcgtaatctgtaa

SEQ ID NO: 138 - protein, 736 aa, Adeno-associated virus 9
MAADGYLPDWLEDNLSEGIREWWALKPGAPQPKANQQHQDNARGLVLPGYKYLGPGNGLDKGEPVNAADAAALEHDKAYDQQLKAGDNPYLKYNHADAEFQERLKEDTSFGGNLGRAVFQAKKRLLEPLGLVEEAAKTAPGKKRPVEQSPQEPDSSAGIGKSGAQPAKKRLNFGQTGDTESVPDPQPIGEPPAAPSGVGSLTMASGGGAPVADNNEGADGVGSSSGNWHCDSQWLGDRVITTSTRTWALPTYNNHLYKQISNSTSGGSSNDNAYFGYSTPWGYFDFNRFHCHFSPRDWQRLINNNWGFRPKRLNFKLFNIQVKEVTDNNGVKTIANNLTSTVQVFTDSDYQLPYVLGSAHEGCLPPFPADVFMIPQYGYLTLNDGSQAVGRSSFYCLEYFPSQMLRTGNNFQFSYEFENVPFHSSYAHSQSLDRLMNPLIDQYLYYLSKTINGSGQNQQTLKFSVAGPSNMAVQGRNYIPGPSYRQQRVSTTVTQNNNSEFAWPGASSWALNGRNSLMNPGPAMASHKEGEDRFFPLSGSLIFGKQGTGRDNVDADKVMITNEEEIKTTNPVATESYGQVATNHQSAQAQAQTGWVQNQGILPGMVWQDRDVYLQGPIWAKIPHTDGNFHPSPLMGGFGMKHPPPQILIKNTPVPADPPTAFNKDKLNSFITQYSTGQVSVEIEWELQKENSKRWNPEIQYTSNYYKSNNVEFAVNTEGVYSEPRPIGTRYLTRNL

SEQ ID NO: 139-199 - skipped (61 entries)

SEQ ID NO: 200 - protein, 15 aa, synthetic construct
TNHQSAQAQAQTGWV

SEQ ID NO: 201 - protein, 15 aa, synthetic construct
TNTQDWHRIAQTGWV

SEQ ID NO: 202 - protein, 15 aa, synthetic construct
TNTKDWHRIAQTGWV

SEQ ID NO: 203 - protein, 15 aa, synthetic construct
TNNQDWHRIAQTGWV

SEQ ID NO: 204 - protein, 15 aa, synthetic construct
SNTQDWHRIAQTGWV

SEQ ID NO: 205 - protein, 15 aa, synthetic construct
TTNQDWHRIAQTGWV

SEQ ID NO: 206 - protein, 15 aa, synthetic construct
TTIQDWHRIAQTGWV

SEQ ID NO: 207 - protein, 15 aa, synthetic construct
TTSQDWHRIAQTGWV

SEQ ID NO: 208 - protein, 15 aa, synthetic construct
TTTQDWHRIAQTGWV

SEQ ID NO: 209 - protein, 15 aa, synthetic construct
TTAQDWHRIAQTGWV

SEQ ID NO: 210 - protein, 15 aa, synthetic construct
TVKQDWHRIAQTGWV

SEQ ID NO: 211 - protein, 15 aa, synthetic construct
TNTQDWHRIAQTGWA

SEQ ID NO: 212 - protein, 15 aa, synthetic construct
TNTQDWHRIAGTGWV

SEQ ID NO: 213 - protein, 15 aa, synthetic construct
TNIQDWHRIAQTGWV

SEQ ID NO: 214 - protein, 15 aa, synthetic construct
TNTQDWHRIAGSNWV

SEQ ID NO: 215 - protein, 15 aa, synthetic construct
TNTQDWHRIAGTNWV

SEQ ID NO: 216 - protein, 15 aa, synthetic construct
TNTQDWHRVPQTGWV

SEQ ID NO: 217 - protein, 15 aa, synthetic construct
TNTQDWHRIAQTNWV

SEQ ID NO: 218 - protein, 15 aa, synthetic construct
STIQDWHRIAQTGWV

SEQ ID NO: 219 - protein, 15 aa, synthetic construct
TTVQDWHRIAQTGWV

SEQ ID NO: 220 - protein, 15 aa, synthetic construct
TGTQDWHRIAQTGWV

SEQ ID NO: 221 - protein, 15 aa, synthetic construct
TNTRDWHRIAQTGWV

SEQ ID NO: 222 - protein, 15 aa, synthetic construct
TNTQDWHRVNQTGWV

SEQ ID NO: 223 - protein, 15 aa, synthetic construct
TNTQDWHRIAQTGWI

SEQ ID NO: 224 - protein, 15 aa, synthetic construct
SNIQDWHRIAQTGWV

SEQ ID NO: 225 - protein, 15 aa, synthetic construct
TYTQDWHRIAQTGWV

SEQ ID NO: 226 - protein, 15 aa, synthetic construct
TNTEDWHRIAQTGWV

SEQ ID NO: 227 - protein, 15 aa, synthetic construct
TNIEDWHRIAQTGWV

SEQ ID NO: 228 - protein, 15 aa, synthetic construct
TNTQDWHRISGTGWV

SEQ ID NO: 229 - protein, 15 aa, synthetic construct
TNSQDWHRIAQTGWV

SEQ ID NO: 230 - protein, 15 aa, synthetic construct
STTQDWHRIAQTGWV

SEQ ID NO: 231 - protein, 15 aa, synthetic construct
TNTSDWHRIAQTGWV

SEQ ID NO: 232 - protein, 15 aa, synthetic construct
TNTQDWHRVAQTGWV

SEQ ID NO: 233 - protein, 15 aa, synthetic construct
TNTQDWHRIAQTGWD

SEQ ID NO: 234 - protein, 15 aa, synthetic construct
TNTQDWHRVTMTGWV

SEQ ID NO: 235 - protein, 15 aa, synthetic construct
TNTQDWHRISMTGWV

SEQ ID NO: 236 - protein, 15 aa, synthetic construct
TNTQDWHRISQTGWV

SEQ ID NO: 237 - protein, 15 aa, synthetic construct
TNTQDWHRVSQTGWV

SEQ ID NO: 238 - protein, 15 aa, synthetic construct
TSTQDWHRIAQTGWV

SEQ ID NO: 239 - protein, 15 aa, synthetic construct
TNTQDWHRIANTGWV

SEQ ID NO: 240 - protein, 15 aa, synthetic construct
TNTQDWHRIANSVWV

SEQ ID NO: 241 - protein, 15 aa, synthetic construct
TNTQDWHRIWQTGWV

SEQ ID NO: 242 - protein, 15 aa, synthetic construct
TNTQDWHRIFQTGWV

SEQ ID NO: 243 - protein, 15 aa, synthetic construct
TNTQDWHRIQQTGWV

SEQ ID NO: 244 - protein, 15 aa, synthetic construct
TNTQDWHRIPQTGWV

SEQ ID NO: 245 - protein, 15 aa, synthetic construct
KNTQDWHRIAQTGWV

SEQ ID NO: 246 - protein, 15 aa, synthetic construct
TNTQVWHRIAQTGWV

SEQ ID NO: 247 - protein, 15 aa, synthetic construct
TNTQDWHRVQQTGWV

SEQ ID NO: 248 - protein, 15 aa, synthetic construct
STSQDWHRIAQTGWV

SEQ ID NO: 249 - protein, 15 aa, synthetic construct
SNSQDWHRIAQTGWV

SEQ ID NO: 250 - protein, 15 aa, synthetic construct
TNTQDWHRIFMTGWV

SEQ ID NO: 251 - protein, 15 aa, synthetic construct
TNTQHWHRIAQTGWV

SEQ ID NO: 252 - protein, 15 aa, synthetic construct
TNTQNWHRIAQTGWV

SEQ ID NO: 253 - protein, 15 aa, synthetic construct
TNLQDWHRIAQTGWV

SEQ ID NO: 254 - protein, 15 aa, synthetic construct
TNTQDWHRIAMTGWV

SEQ ID NO: 255 - protein, 15 aa, synthetic construct
TITQDWHRIAQTGWV

SEQ ID NO: 256 - protein, 15 aa, synthetic construct
TNTQAWHRIAQTGWV

SEQ ID NO: 257 - protein, 15 aa, synthetic construct
TNTQDWHRIANTQWV

SEQ ID NO: 258 - protein, 15 aa, synthetic construct
TNTQDWHRIAKTGWV

SEQ ID NO: 259 - protein, 15 aa, synthetic construct
TNTQDWHRIAQTRWV

SEQ ID NO: 260 - protein, 15 aa, synthetic construct
TSMQDWHRIAQTGWV

SEQ ID NO: 261 - protein, 15 aa, synthetic construct
TNTQDWHRISNTGWV

SEQ ID NO: 262 - protein, 15 aa, synthetic construct
TNTQDWHRIANNNWV

SEQ ID NO: 263 - protein, 15 aa, synthetic construct
TNTQDWHRIYQTGWV

SEQ ID NO: 264 - protein, 15 aa, synthetic construct
TNTPDWHRIAQTGWV

SEQ ID NO: 265 - protein, 15 aa, synthetic construct
TNTQDWHRINQTGWV

SEQ ID NO: 266-267 - skipped (2 entries)

SEQ ID NO: 268 - protein, 15 aa, synthetic construct
TTTKDWHRIAQTGWV

SEQ ID NO: 269 - protein, 15 aa, synthetic construct
TNIKDWHRIAQTGWV

SEQ ID NO: 270 - protein, 15 aa, synthetic construct
TSTKDWHRIAQTGWV

SEQ ID NO: 271 - protein, 15 aa, synthetic construct
SNNQDWHRIAQTGWV

SEQ ID NO: 272 - protein, 15 aa, synthetic construct
TNNQDWHRIAQTGWA

SEQ ID NO: 273 - protein, 15 aa, synthetic construct
TNNQDWHRISQTGWV

SEQ ID NO: 274 - protein, 15 aa, synthetic construct
TNNQDWHRVAQTGWV

SEQ ID NO: 275 - protein, 15 aa, synthetic construct
SNMQTALQLAQTGWV

SEQ ID NO: 276 - protein, 15 aa, synthetic construct
TSNQDWHRIAQTGWV

SEQ ID NO: 277 - protein, 15 aa, synthetic construct
TNNQDWHRIPQTGWV

SEQ ID NO: 278 - protein, 15 aa, synthetic construct
TNNQDWHRIAQTGWD

SEQ ID NO: 279 - protein, 15 aa, synthetic construct
TNNQDWHRIAQTGWF

SEQ ID NO: 280 - protein, 15 aa, synthetic construct
INNQDWHRIAQTGWV

SEQ ID NO: 281 - protein, 15 aa, synthetic construct
TYNQDWHRIAQTGWV

SEQ ID NO: 282 - protein, 15 aa, synthetic construct
TINQDWHRIAQTGWV

SEQ ID NO: 283 - protein, 15 aa, synthetic construct
TNIQDWHRVAQTGWV

SEQ ID NO: 284 - protein, 15 aa, synthetic construct
TNIQDWHRIAQTGWA

SEQ ID NO: 285 - protein, 15 aa, synthetic construct
SNTQDWHRVAQTGWV

SEQ ID NO: 286 - protein, 15 aa, synthetic construct
TTLQDWHRIAQTGWV

SEQ ID NO: 287 - protein, 15 aa, synthetic construct
TNTQDWHTIAHTGWV

SEQ ID NO: 288 - protein, 15 aa, synthetic construct
SNTQDWHRIAQTGWG

SEQ ID NO: 289 - protein, 15 aa, synthetic construct
TNNQDWHKIAQTGWV

SEQ ID NO: 290 - protein, 15 aa, synthetic construct
TTTQDWHRVAQTGWV

SEQ ID NO: 291 - protein, 15 aa, synthetic construct
TNSQDWHRIAQTGWA

SEQ ID NO: 292 - protein, 15 aa, synthetic construct
SNTQDWHRISQTGWV

SEQ ID NO: 293 - protein, 15 aa, synthetic construct
TNSQDWHRVAQTGWV

SEQ ID NO: 294 - protein, 15 aa, synthetic construct
TNIQDWHRISQTGWV

SEQ ID NO: 295 - protein, 15 aa, synthetic construct
TYIQDWHRIAQTGWV

SEQ ID NO: 296 - protein, 15 aa, synthetic construct
TNNQDWHRNAQTGWV

SEQ ID NO: 297 - protein, 15 aa, synthetic construct
TITQDWHRVAQTGWV

SEQ ID NO: 298 - protein, 15 aa, synthetic construct
TNNQDSHRIAQTGWV

SEQ ID NO: 299 - protein, 15 aa, synthetic construct
TNTEDWHRVAQTGWV

SEQ ID NO: 300 - protein, 15 aa, synthetic construct
TTTQDWHRIPQTGWV

SEQ ID NO: 301 - protein, 15 aa, synthetic construct
TSTQDWHRIAQTGWA

SEQ ID NO: 302 - protein, 15 aa, synthetic construct
TNTQDWHRIAQTGWC

SEQ ID NO: 303 - protein, 15 aa, synthetic construct
TNTQDWHRSAQTGWA

SEQ ID NO: 304 - protein, 15 aa, synthetic construct
TNNQDWQRIAQTGWV

SEQ ID NO: 305 - protein, 15 aa, synthetic construct
TNIQDWHRIPQTGWV

SEQ ID NO: 306 - protein, 15 aa, synthetic construct
TTTQDWHRIAQTGWI

SEQ ID NO: 307 - protein, 15 aa, synthetic construct
TNTQDWHRIAQTGWS

SEQ ID NO: 308 - protein, 15 aa, synthetic construct
TTTQDWHRISQTGWV

SEQ ID NO: 309 - protein, 15 aa, synthetic construct
TSTQDWHRVAQTGWV

SEQ ID NO: 310 - protein, 15 aa, synthetic construct
TNSQDWHKIAQTGWA

SEQ ID NO: 311 - protein, 15 aa, synthetic construct
TNIQDWHRIAQTGWD

SEQ ID NO: 312 - protein, 15 aa, synthetic construct
TYTQDWHKIAQTGWV

SEQ ID NO: 313 - protein, 15 aa, synthetic construct
TYTQDWHRIAQTGWA

SEQ ID NO: 314 - protein, 15 aa, synthetic construct
TNTQDWHRISQTGWA

SEQ ID NO: 315 - protein, 15 aa, synthetic construct
TNMQDWHRIAQTGWV

SEQ ID NO: 316 - protein, 15 aa, synthetic construct
TNTQDWHRIAQTGWT

SEQ ID NO: 317 - protein, 15 aa, synthetic construct
TITQDWHRTAQTGWV

SEQ ID NO: 318 - protein, 15 aa, synthetic construct
TNTQDWHRVAQTGWA

SEQ ID NO: 319 - protein, 15 aa, synthetic construct
SNTQDWHRIAQTAWV

SEQ ID NO: 320 - protein, 15 aa, synthetic construct
TNNQDGQRIAQTGWV

SEQ ID NO: 321 - protein, 15 aa, synthetic construct
TNNQDGHRIAQTGWV

SEQ ID NO: 322 - protein, 15 aa, synthetic construct
TNNQDLHRIAQTGWV

SEQ ID NO: 323 - protein, 15 aa, synthetic construct
TTTQDWHRIAQTGWA

SEQ ID NO: 324 - protein, 15 aa, synthetic construct
TNTQDWHRIGQTGWA

SEQ ID NO: 325 - protein, 15 aa, synthetic construct
TNNQDWHRIAQTGGV

SEQ ID NO: 326 - protein, 15 aa, synthetic construct
SYTQDWHRIAQTGWV

SEQ ID NO: 327 - protein, 15 aa, synthetic construct
TNTEDWHRIAQTGWA

SEQ ID NO: 328 - protein, 15 aa, synthetic construct
TYTQDWHRIAQTGWG

SEQ ID NO: 329 - protein, 15 aa, synthetic construct
TNNQDWHSIAQTGWV

SEQ ID NO: 330 - protein, 15 aa, synthetic construct
TNCQDWHRIAQTGWV

SEQ ID NO: 331 - protein, 15 aa, synthetic construct
TNTQDWHRMAQTGWA

SEQ ID NO: 332 - protein, 15 aa, synthetic construct
SSTQDWHRIAQTGWV

SEQ ID NO: 333 - protein, 15 aa, synthetic construct
TYTQDWHRTAQTGWV

SEQ ID NO: 334 - protein, 15 aa, synthetic construct
TYTQDWHRVAQTGWV

SEQ ID NO: 335 - protein, 15 aa, synthetic construct
SNTQDWHRIAQTGWD

SEQ ID NO: 336 - protein, 15 aa, synthetic construct
TVTQDWHRIAQTGWV

SEQ ID NO: 337 - protein, 15 aa, synthetic construct
QNTQDWHRIAQTGWV

SEQ ID NO: 338 - skipped

SEQ ID NO: 339 - protein, 15 aa, synthetic construct
TNSQDWHRIPQTGWV

SEQ ID NO: 340 - protein, 15 aa, synthetic construct
TNTQDWHRIAQPGWG

SEQ ID NO: 341 - protein, 15 aa, synthetic construct
TNTQDWHRVAQTGWD

SEQ ID NO: 342 - protein, 15 aa, synthetic construct
TNTEDWHRIAQTGWG

SEQ ID NO: 343 - protein, 11 aa, synthetic construct
TNTQDWHRIAQ

SEQ ID NO: 344 - protein, 11 aa, synthetic construct
TNTKDWHRIAQ

SEQ ID NO: 345 - protein, 11 aa, synthetic construct
SNNQDWHRIAQ

SEQ ID NO: 346 - protein, 11 aa, synthetic construct
TNKQDWHRIAQ

SEQ ID NO: 347 - protein, 11 aa, synthetic construct
TNNEDWHRIAQ

SEQ ID NO: 348 - protein, 11 aa, synthetic construct
SNKQDWHRIAQ

SEQ ID NO: 349 - protein, 11 aa, synthetic construct
SNTQDWHRIAQ

SEQ ID NO: 350 - protein, 11 aa, synthetic construct
TTNQDWHRIAQ

SEQ ID NO: 351 - protein, 11 aa, synthetic construct
TNDQDWHRIAQ

SEQ ID NO: 352 - protein, 11 aa, synthetic construct
TTIQDWHRIAQ

SEQ ID NO: 353 - protein, 11 aa, synthetic construct
RNTQDWHRIAQ

SEQ ID NO: 354 - protein, 11 aa, synthetic construct
TTKQDWHRIAQ

SEQ ID NO: 355 - protein, 11 aa, synthetic construct
TTSQDWHRIAQ

SEQ ID NO: 356 - protein, 11 aa, synthetic construct
TTDQDWHRIAQ

SEQ ID NO: 357 - protein, 11 aa, synthetic construct
TNPSDWHRIAQ

SEQ ID NO: 358 - protein, 11 aa, synthetic construct
TNKEDWHRIAQ

SEQ ID NO: 359 - protein, 11 aa, synthetic construct
TTTQDWHRIAQ

SEQ ID NO: 360 - protein, 11 aa, synthetic construct
TGKQDWHRIAQ

SEQ ID NO: 361 - protein, 11 aa, synthetic construct
TTAQDWHRIAQ

SEQ ID NO: 362 - protein, 11 aa, synthetic construct
TVKQDWHRIAQ

SEQ ID NO: 363 - protein, 11 aa, synthetic construct
TNYQDWHRIAQ

SEQ ID NO: 364 - protein, 11 aa, synthetic construct
TNTPDWHRIAQ

SEQ ID NO: 365 - protein, 11 aa, synthetic construct
STKQDWHRIAQ

SEQ ID NO: 366 - protein, 11 aa, synthetic construct
TNNQDWHRIAQ

SEQ ID NO: 367 - protein, 11 aa, synthetic construct
TNTQDWHRIAG

SEQ ID NO: 368 - protein, 11 aa, synthetic construct
TTEQDWHRIAQ

SEQ ID NO: 369 - protein, 11 aa, synthetic construct
TSKQDWHRIAQ

SEQ ID NO: 370 - protein, 11 aa, synthetic construct
TNIQDWHRIAQ

SEQ ID NO: 371 - protein, 11 aa, synthetic construct
TNTQDWHRIYQ

SEQ ID NO: 372 - protein, 11 aa, synthetic construct
TYNQDWHRIAQ

SEQ ID NO: 373 - protein, 11 aa, synthetic construct
TNTQDWHRVPQ

SEQ ID NO: 374 - protein, 11 aa, synthetic construct
TNTQDWHRIAN

SEQ ID NO: 375 - protein, 11 aa, synthetic construct
STIQDWHRIAQ

SEQ ID NO: 376 - protein, 11 aa, synthetic construct
TTVQDWHRIAQ

SEQ ID NO: 377 - protein, 11 aa, synthetic construct
TGTQDWHRIAQ

SEQ ID NO: 378 - protein, 11 aa, synthetic construct
TNTQDWHRINQ

SEQ ID NO: 379 - protein, 11 aa, synthetic construct
TNTRDWHRIAQ

SEQ ID NO: 380 - protein, 11 aa, synthetic construct
TNTQDWHRVNQ

SEQ ID NO: 381 - protein, 11 aa, synthetic construct
TTLQDWHRIAQ

SEQ ID NO: 382 - protein, 11 aa, synthetic construct
TTMQDWHRIAQ

SEQ ID NO: 383 - protein, 11 aa, synthetic construct
ANNQDWHRIAQ

SEQ ID NO: 384 - protein, 11 aa, synthetic construct
SNIQDWHRIAQ

SEQ ID NO: 385 - protein, 11 aa, synthetic construct
TKNQDWHRIAQ

SEQ ID NO: 386 - protein, 11 aa, synthetic construct
TYTQDWHRIAQ

SEQ ID NO: 387 - protein, 11 aa, synthetic construct
TNKSDWHRIAQ

SEQ ID NO: 388 - protein, 11 aa, synthetic construct
TNTQDWHRVYQ

SEQ ID NO: 389 - protein, 11 aa, synthetic construct
SNTEDWHRIAQ

SEQ ID NO: 390 - protein, 11 aa, synthetic construct
TNTEDWHRIAQ

SEQ ID NO: 391 - protein, 11 aa, synthetic construct
TNIEDWHRIAQ

SEQ ID NO: 392 - protein, 11 aa, synthetic construct
TTRQDWHRIAQ

SEQ ID NO: 393 - protein, 11 aa, synthetic construct
TNTQDWHRVAN

SEQ ID NO: 394 - protein, 11 aa, synthetic construct
TNTQDWHRISG

SEQ ID NO: 395 - protein, 11 aa, synthetic construct
TNSQDWHRIAQ

SEQ ID NO: 396 - protein, 11 aa, synthetic construct
TYTKDWHRIAQ

SEQ ID NO: 397 - protein, 11 aa, synthetic construct
TTTKDWHRIAQ

SEQ ID NO: 398 - protein, 11 aa, synthetic construct
TNIKDWHRIAQ

SEQ ID NO: 399 - protein, 11 aa, synthetic construct
TNTKDWHRISQ

SEQ ID NO: 400 - protein, 11 aa, synthetic construct
SNTKDWHRIAQ

SEQ ID NO: 401 - protein, 11 aa, synthetic construct
TNNKDWHRIAQ

SEQ ID NO: 402 - protein, 11 aa, synthetic construct
TNSKDWHRIAQ

SEQ ID NO: 403 - protein, 11 aa, synthetic construct
TSTKDWHRIAQ

SEQ ID NO: 404 - protein, 11 aa, synthetic construct
TNTKDWHRVAQ

SEQ ID NO: 405 - protein, 11 aa, synthetic construct
TITKDWHRIAQ

SEQ ID NO: 406 - protein, 11 aa, synthetic construct
INTKDWHRIAQ

SEQ ID NO: 407 - protein, 11 aa, synthetic construct
TNAKDWHRIAQ

SEQ ID NO: 408 - protein, 11 aa, synthetic construct
TNTKDWHRITQ

SEQ ID NO: 409 - protein, 11 aa, synthetic construct
TNTKDWHRTAQ

SEQ ID NO: 410 - protein, 11 aa, synthetic construct
TKTKDWHRIAQ

SEQ ID NO: 411 - protein, 11 aa, synthetic construct
STNQDWHRIAQ

SEQ ID NO: 412 - protein, 11 aa, synthetic construct
TNTKDWHRMAQ

SEQ ID NO: 413 - protein, 11 aa, synthetic construct
TNTKDWHRSAQ

SEQ ID NO: 414 - protein, 11 aa, synthetic construct
TNTKDWHRIGQ

SEQ ID NO: 415 - protein, 11 aa, synthetic construct
TNTKDWHRIEQ

SEQ ID NO: 416 - protein, 11 aa, synthetic construct
ANTKDWHRIAQ

SEQ ID NO: 417 - protein, 11 aa, synthetic construct
RNNQDWHRIAQ

SEQ ID NO: 418 - protein, 11 aa, synthetic construct
TNTKDWHRIVQ

SEQ ID NO: 419 - protein, 11 aa, synthetic construct
TNNQDWHRISQ

SEQ ID NO: 420 - protein, 11 aa, synthetic construct
TNNQDWHRVAQ

SEQ ID NO: 421 - protein, 11 aa, synthetic construct
TNTKDWHRNAQ

SEQ ID NO: 422 - protein, 11 aa, synthetic construct
TGNQDWHRIAQ

SEQ ID NO: 423 - protein, 11 aa, synthetic construct
TNTKDWHRLAQ

SEQ ID NO: 424 - protein, 11 aa, synthetic construct
TNNQDWHRIAN

SEQ ID NO: 425 - protein, 11 aa, synthetic construct
TNTKDWHRIAK

SEQ ID NO: 426 - protein, 11 aa, synthetic construct
TNTKDWHRIAH

SEQ ID NO: 427 - protein, 11 aa, synthetic construct
TSNQDWHRIAQ

SEQ ID NO: 428 - protein, 11 aa, synthetic construct
TNNQDWHRIPQ

SEQ ID NO: 429 - protein, 11 aa, synthetic construct
THTKDWHRIAQ

SEQ ID NO: 430 - protein, 11 aa, synthetic construct
TDTKDWHRIAQ

SEQ ID NO: 431 - protein, 11 aa, synthetic construct
TNTKDWHRIAR

SEQ ID NO: 432 - protein, 11 aa, synthetic construct
TNEQDWHRIAQ

SEQ ID NO: 433 - protein, 11 aa, synthetic construct
CNTQDWHRIAQ

SEQ ID NO: 434 - protein, 11 aa, synthetic construct
TNPKDWHRIAQ

SEQ ID NO: 435 - protein, 11 aa, synthetic construct
TNTKDWHRIAE

SEQ ID NO: 436 - protein, 11 aa, synthetic construct
TNTKDWHRIAL

SEQ ID NO: 437 - protein, 11 aa, synthetic construct
INNQDWHRIAQ

SEQ ID NO: 438 - protein, 11 aa, synthetic construct
TYTEDWHRIAQ

SEQ ID NO: 439 - protein, 11 aa, synthetic construct
TNNQDWHRITQ

SEQ ID NO: 440 - protein, 11 aa, synthetic construct
NNNQDWHRIAQ

SEQ ID NO: 441 - protein, 11 aa, synthetic construct
KNNQDWHRIAQ

SEQ ID NO: 442 - protein, 11 aa, synthetic construct
TNNQDWHRIAR

SEQ ID NO: 443 - protein, 11 aa, synthetic construct
SNTQDWHRVPQ

SEQ ID NO: 444 - protein, 11 aa, synthetic construct
TNNQDWHRIAK

SEQ ID NO: 445 - protein, 11 aa, synthetic construct
TNTKDWHRIAP

SEQ ID NO: 446 - protein, 11 aa, synthetic construct
TNNRDWHRIAQ

SEQ ID NO: 447 - protein, 11 aa, synthetic construct
LNNQDWHRIAQ

SEQ ID NO: 448 - protein, 11 aa, synthetic construct
TINQDWHRIAQ

SEQ ID NO: 449 - protein, 11 aa, synthetic construct
TNNQDWHRIAH

SEQ ID NO: 450 - protein, 11 aa, synthetic construct
TNNQDWHRIGQ

SEQ ID NO: 451 - protein, 11 aa, synthetic construct
TNNQDWHRFAQ

SEQ ID NO: 452 - protein, 11 aa, synthetic construct
SNNQDWHRMAQ

SEQ ID NO: 453 - protein, 11 aa, synthetic construct
TNHQDWHRIAQ

SEQ ID NO: 454 - protein, 11 aa, synthetic construct
STTQDWHRIAQ

SEQ ID NO: 455 - protein, 11 aa, synthetic construct
TNNQDWHRTAQ

SEQ ID NO: 456 - protein, 11 aa, synthetic construct
SNSQDWHRIAQ

SEQ ID NO: 457 - protein, 11 aa, synthetic construct
TNIQDWHRVAQ

SEQ ID NO: 458 - protein, 11 aa, synthetic construct
SNTQDWHRVAQ

SEQ ID NO: 459 - protein, 11 aa, synthetic construct
TNSQDWHRIAG

SEQ ID NO: 460 - protein, 11 aa, synthetic construct
TTTQDWHRVAQ

SEQ ID NO: 461 - protein, 11 aa, synthetic construct
SNTQDWHRISQ

SEQ ID NO: 462 - protein, 11 aa, synthetic construct
SNSQDWHRVAQ

SEQ ID NO: 463 - protein, 11 aa, synthetic construct
SNTQDWHRIAG

SEQ ID NO: 464 - protein, 11 aa, synthetic construct
TNSQDWHRVAQ

SEQ ID NO: 465 - protein, 11 aa, synthetic construct
TNNQDWHRSAQ

SEQ ID NO: 466 - protein, 11 aa, synthetic construct
STSQDWHRIAQ

SEQ ID NO: 467 - protein, 11 aa, synthetic construct
TNNQDWHRMAQ

SEQ ID NO: 468 - protein, 11 aa, synthetic construct
TNNQDWHRLAQ

SEQ ID NO: 469 - protein, 11 aa, synthetic construct
TNIQDWHRISQ

SEQ ID NO: 470 - protein, 11 aa, synthetic construct
TNTQDWHRIPQ

SEQ ID NO: 471 - protein, 11 aa, synthetic construct
TNTQDWHRTAQ

SEQ ID NO: 472 - protein, 11 aa, synthetic construct
TYIQDWHRIAQ

SEQ ID NO: 473 - protein, 11 aa, synthetic construct
TNNQDWHRIVQ

SEQ ID NO: 474 - protein, 11 aa, synthetic construct
TNNQDWHRNAQ

SEQ ID NO: 475 - protein, 11 aa, synthetic construct
SGTQDWHRIAQ

SEQ ID NO: 476 - protein, 11 aa, synthetic construct
THNQDWHRIAQ

SEQ ID NO: 477 - protein, 11 aa, synthetic construct
TITQDWHRVAQ

SEQ ID NO: 478 - protein, 11 aa, synthetic construct
TNTEDWHRVAQ

SEQ ID NO: 479 - protein, 11 aa, synthetic construct
TTTQDWHRIPQ

SEQ ID NO: 480 - protein, 11 aa, synthetic construct
SNNQDWHRIAE

SEQ ID NO: 481 - protein, 11 aa, synthetic construct
TSTQDWHRIAQ

SEQ ID NO: 482 - protein, 11 aa, synthetic construct
TNTQDWHRVAQ

SEQ ID NO: 483 - protein, 11 aa, synthetic construct
TNIQDWHRIAN

SEQ ID NO: 484 - protein, 11 aa, synthetic construct
TNSNDWHRIAQ

SEQ ID NO: 485 - protein, 11 aa, synthetic construct
TNTQDWHRSAQ

SEQ ID NO: 486 - protein, 11 aa, synthetic construct
TNIQDWHRIPQ

SEQ ID NO: 487 - protein, 11 aa, synthetic construct
SNTQDWHRIAN

SEQ ID NO: 488 - protein, 11 aa, synthetic construct
TNTQDWHRISQ

SEQ ID NO: 489 - protein, 11 aa, synthetic construct
TNNQDWHRIEQ

SEQ ID NO: 490 - protein, 11 aa, synthetic construct
RNTQDWHRISQ

SEQ ID NO: 491 - protein, 11 aa, synthetic construct
TNQQDWHRIAQ

SEQ ID NO: 492 - protein, 11 aa, synthetic construct
RNIQDWHRIAQ

SEQ ID NO: 493 - protein, 11 aa, synthetic construct
TTTQDWHRISQ

SEQ ID NO: 494 - protein, 11 aa, synthetic construct
TSTQDWHRVAQ

SEQ ID NO: 495 - protein, 11 aa, synthetic construct
TSTQDWHRVSQ

SEQ ID NO: 496 - protein, 11 aa, synthetic construct
TNKQDWHRIEQ

SEQ ID NO: 497 - protein, 11 aa, synthetic construct
TNNPDWHRIAQ

SEQ ID NO: 498 - protein, 11 aa, synthetic construct
TITEDWHRIAQ

SEQ ID NO: 499 - protein, 11 aa, synthetic construct
TNTNDWHRIAQ

SEQ ID NO: 500 - protein, 11 aa, synthetic construct
SNTQDWHRIPQ

SEQ ID NO: 501 - protein, 11 aa, synthetic construct
STTQDWHRISQ

SEQ ID NO: 502 - protein, 11 aa, synthetic construct
TFSQDWHRIAQ

SEQ ID NO: 503 - protein, 11 aa, synthetic construct
RNSQDWHRIAQ

SEQ ID NO: 504 - protein, 11 aa, synthetic construct
INTQDWHRIAQ

SEQ ID NO: 505 - protein, 11 aa, synthetic construct
RNTEDWHRIAQ

SEQ ID NO: 506 - protein, 11 aa, synthetic construct
TNNHDWHRIAQ

SEQ ID NO: 507 - protein, 11 aa, synthetic construct
SNTQDWHRVSQ

SEQ ID NO: 508 - protein, 11 aa, synthetic construct
TNMQDWHRIAQ

SEQ ID NO: 509 - protein, 11 aa, synthetic construct
TNSQDWHRVPQ

SEQ ID NO: 510 - protein, 11 aa, synthetic construct
RTTQDWHRIAQ

SEQ ID NO: 511 - protein, 11 aa, synthetic construct
SNIEDWHRIAQ

SEQ ID NO: 512 - protein, 11 aa, synthetic construct
TITQDWHRTAQ

SEQ ID NO: 513 - protein, 11 aa, synthetic construct
TNTSDWHRIAQ

SEQ ID NO: 514 - protein, 11 aa, synthetic construct
TNTQDWHRVTM

SEQ ID NO: 515 - protein, 11 aa, synthetic construct
TNTQDWHRISM

SEQ ID NO: 516 - protein, 11 aa, synthetic construct
TNTQDWHRVSQ

SEQ ID NO: 517 - protein, 11 aa, synthetic construct
TNTQDWHRIWQ

SEQ ID NO: 518 - protein, 11 aa, synthetic construct
TNTQDWHRIFQ

SEQ ID NO: 519 - protein, 11 aa, synthetic construct
TNTQDWHRIQQ

SEQ ID NO: 520 - protein, 11 aa, synthetic construct
KNTQDWHRIAQ

SEQ ID NO: 521 - protein, 11 aa, synthetic construct
TNTQDWHRVQQ

SEQ ID NO: 522 - protein, 11 aa, synthetic construct
TNTQDWHRIFM

SEQ ID NO: 523 - protein, 11 aa, synthetic construct
TNLQDWHRIAQ

SEQ ID NO: 524 - protein, 11 aa, synthetic construct
TNTQDWHRIAM

SEQ ID NO: 525 - protein, 11 aa, synthetic construct
TITQDWHRIAQ

SEQ ID NO: 526 - protein, 11 aa, synthetic construct
TNTQDWHRIAK

SEQ ID NO: 527 - protein, 11 aa, synthetic construct
TSMQDWHRIAQ

SEQ ID NO: 528 - protein, 11 aa, synthetic construct
TNTQDWHRISN

SEQ ID NO: 529 - protein, 11 aa, synthetic construct
TNTQDWHRIGQ

SEQ ID NO: 530 - protein, 11 aa, synthetic construct
SYTQDWHRIAQ

SEQ ID NO: 531 - protein, 11 aa, synthetic construct
TNCQDWHRIAQ

SEQ ID NO: 532 - protein, 11 aa, synthetic construct
TNTQDWHRMAQ

SEQ ID NO: 533 - protein, 11 aa, synthetic construct
SSTQDWHRIAQ

SEQ ID NO: 534 - protein, 11 aa, synthetic construct
TYTQDWHRTAQ

SEQ ID NO: 535 - protein, 11 aa, synthetic construct
TYTQDWHRVAQ

SEQ ID NO: 536 - protein, 11 aa, synthetic construct
TVTQDWHRIAQ

SEQ ID NO: 537 - protein, 11 aa, synthetic construct
QNTQDWHRIAQ

SEQ ID NO: 538 - protein, 11 aa, synthetic construct
TNSQDWHRIPQ

SEQ ID NO: 539 - protein, 15 aa, synthetic construct
TNKQDWHRIAQTGWV

SEQ ID NO: 540 - protein, 15 aa, synthetic construct
TNNEDWHRIAQTGWV

SEQ ID NO: 541 - protein, 15 aa, synthetic construct
SNKQDWHRIAQTGWV

SEQ ID NO: 542 - protein, 15 aa, synthetic construct
TNDQDWHRIAQTGWV

SEQ ID NO: 543 - protein, 15 aa, synthetic construct
TNTKDRHRIAQTGWV

SEQ ID NO: 544 - protein, 15 aa, synthetic construct
RNTQDWHRIAQTGWV

SEQ ID NO: 545 - protein, 15 aa, synthetic construct
TNTKDSHRIAQTGWV

SEQ ID NO: 546 - protein, 15 aa, synthetic construct
TTKQDWHRIAQTGWV

SEQ ID NO: 547 - protein, 15 aa, synthetic construct
TTDQDWHRIAQTGWV

SEQ ID NO: 548 - protein, 15 aa, synthetic construct
TNTKDLHRIAQTGWV

SEQ ID NO: 549 - protein, 15 aa, synthetic construct
TNPSDWHRIAQTGWV

SEQ ID NO: 550 - protein, 15 aa, synthetic construct
TNKEDWHRIAQTGWV

SEQ ID NO: 551 - protein, 15 aa, synthetic construct
TGKQDWHRIAQTGWV

SEQ ID NO: 552 - protein, 15 aa, synthetic construct
TNYQDWHRIAQTGWV

SEQ ID NO: 553 - protein, 15 aa, synthetic construct
STKQDWHRIAQTGWV

SEQ ID NO: 554 - protein, 15 aa, synthetic construct
TNTQDWHRIAQTNWS

SEQ ID NO: 555 - protein, 15 aa, synthetic construct
TTEQDWHRIAQTGWV

SEQ ID NO: 556 - protein, 15 aa, synthetic construct
TSKQDWHRIAQTGWV

SEQ ID NO: 557 - protein, 15 aa, synthetic construct
TNTQDWHRIAQTNWI

SEQ ID NO: 558 - protein, 15 aa, synthetic construct
TNNQEWHRIAQTGWV

SEQ ID NO: 559 - protein, 15 aa, synthetic construct
TNTQDWHRIANSNWV

SEQ ID NO: 560 - protein, 15 aa, synthetic construct
TTMQDWHRIAQTGWV

SEQ ID NO: 561 - protein, 15 aa, synthetic construct
ANNQDWHRIAQTGWV

SEQ ID NO: 562 - protein, 15 aa, synthetic construct
TKNQDWHRIAQTGWV

SEQ ID NO: 563 - protein, 15 aa, synthetic construct
TNKSDWHRIAQTGWV

SEQ ID NO: 564 - protein, 15 aa, synthetic construct
TNTQDWHRVYQTGWV

SEQ ID NO: 565 - protein, 15 aa, synthetic construct
SNTEDWHRIAQTGWV

SEQ ID NO: 566 - protein, 15 aa, synthetic construct
TTRQDWHRIAQTGWV

SEQ ID NO: 567 - protein, 15 aa, synthetic construct
TNTQDWHRVANTGWV

SEQ ID NO: 568 - protein, 15 aa, synthetic construct
TYTKDWHRIAQTGWV

SEQ ID NO: 569 - protein, 15 aa, synthetic construct
TNTKDWHRISQTGWV

SEQ ID NO: 570 - protein, 15 aa, synthetic construct
SNTKDWHRIAQTGWV

SEQ ID NO: 571 - protein, 15 aa, synthetic construct
TNNKDWHRIAQTGWV

SEQ ID NO: 572 - protein, 15 aa, synthetic construct
TNSKDWHRIAQTGWV

SEQ ID NO: 573 - protein, 15 aa, synthetic construct
TITKDWHRIAQTGWV

SEQ ID NO: 574 - protein, 15 aa, synthetic construct
TNTKDWHRIAQTGWG

SEQ ID NO: 575 - protein, 15 aa, synthetic construct
INTKDWHRIAQTGWV

SEQ ID NO: 576 - protein, 15 aa, synthetic construct
TNAKDWHRIAQTGWV

SEQ ID NO: 577 - protein, 15 aa, synthetic construct
TNTKDWHRITQTGWV

SEQ ID NO: 578 - protein, 15 aa, synthetic construct
TNTKDWHRTAQTGWV

SEQ ID NO: 579 - protein, 15 aa, synthetic construct
TKTKDWHRIAQTGWV

SEQ ID NO: 580 - protein, 15 aa, synthetic construct
STNQDWHRIAQTGWV

SEQ ID NO: 581 - protein, 15 aa, synthetic construct
TNTKDWHRIAQSGWV

SEQ ID NO: 582 - protein, 15 aa, synthetic construct
TNTKDWHRIAQPGWV

SEQ ID NO: 583 - protein, 15 aa, synthetic construct
TNTKDWHRMAQTGWV

SEQ ID NO: 584 - protein, 15 aa, synthetic construct
TNTKDWHRSAQTGWV

SEQ ID NO: 585 - protein, 15 aa, synthetic construct
TNTKDWHRIGQTGWV

SEQ ID NO: 586 - protein, 15 aa, synthetic construct
TNTKDWHRIAQTGSV

SEQ ID NO: 587 - protein, 15 aa, synthetic construct
TNTKDWHRIEQTGWV

SEQ ID NO: 588 - protein, 15 aa, synthetic construct
ANTKDWHRIAQTGWV

SEQ ID NO: 589 - protein, 15 aa, synthetic construct
RNNQDWHRIAQTGWV

SEQ ID NO: 590 - protein, 15 aa, synthetic construct
TNTKDWHKIAQTGWV

SEQ ID NO: 591 - protein, 15 aa, synthetic construct
TNTKDWLRIAQTGWV

SEQ ID NO: 592 - protein, 15 aa, synthetic construct
TNTKDWHRIVQTGWV

SEQ ID NO: 593 - protein, 15 aa, synthetic construct
TNTKDWHRNAQTGWV

SEQ ID NO: 594 - protein, 15 aa, synthetic construct
TNTKEWHRIAQTGWV

SEQ ID NO: 595 - protein, 15 aa, synthetic construct
TNTKDWHRIAQTDWV

SEQ ID NO: 596 - protein, 15 aa, synthetic construct
TNTKDWHRIAQTGCV

SEQ ID NO: 597 - protein, 15 aa, synthetic construct
TNTKDWQRIAQTGWV

SEQ ID NO: 598 - protein, 15 aa, synthetic construct
TGNQDWHRIAQTGWV

SEQ ID NO: 599 - protein, 15 aa, synthetic construct
TNTKDWHRLAQTGWV

SEQ ID NO: 600 - protein, 15 aa, synthetic construct
TNTKDWNRIAQTGWV

SEQ ID NO: 601 - protein, 15 aa, synthetic construct
TNNQDWHRIAQTGWI

SEQ ID NO: 602 - protein, 15 aa, synthetic construct
TNNQDWHRIANTGWV

SEQ ID NO: 603 - protein, 15 aa, synthetic construct
TNTKDWHRIAKTGWV

SEQ ID NO: 604 - protein, 15 aa, synthetic construct
TNTKDWHRIAHTGWV

SEQ ID NO: 605 - protein, 15 aa, synthetic construct
TNTKDWHRIAQTGRV

SEQ ID NO: 606 - protein, 15 aa, synthetic construct
TNTKDWHRIAQTGLV

SEQ ID NO: 607 - protein, 15 aa, synthetic construct
TNTKDWHRIAQTGGV

SEQ ID NO: 608 - protein, 15 aa, synthetic construct
TNTKDWHRIAQAGWV

SEQ ID NO: 609 - protein, 15 aa, synthetic construct
TNTKDWHTIAQTGWV

SEQ ID NO: 610 - protein, 15 aa, synthetic construct
THTKDWHRIAQTGWV

SEQ ID NO: 611 - protein, 15 aa, synthetic construct
TNTKDWHRIAQIGWV

SEQ ID NO: 612 - protein, 15 aa, synthetic construct
TDTKDWHRIAQTGWV

SEQ ID NO: 613 - protein, 15 aa, synthetic construct
TNTKDWHRIAQNGWV

SEQ ID NO: 614 - protein, 15 aa, synthetic construct
TNTKDWHRIARTGWV

SEQ ID NO: 615 - protein, 15 aa, synthetic construct
TNTKDWHSIAQTGWV

SEQ ID NO: 616 - protein, 15 aa, synthetic construct
TNNQDWHRIAQTGWG

SEQ ID NO: 617 - protein, 15 aa, synthetic construct
TNEQDWHRIAQTGWV

SEQ ID NO: 618 - protein, 15 aa, synthetic construct
CNTQDWHRIAQTGWV

SEQ ID NO: 619 - protein, 15 aa, synthetic construct
TTNQDWHRIAQSGWV

SEQ ID NO: 620 - protein, 15 aa, synthetic construct
TNPKDWHRIAQTGWV

SEQ ID NO: 621 - protein, 15 aa, synthetic construct
TNTKDWHRIAETGWV

SEQ ID NO: 622 - protein, 15 aa, synthetic construct
TNTKDWHRIALTGWV

SEQ ID NO: 623 - protein, 15 aa, synthetic construct
TNTKDWHGIAQTGWV

SEQ ID NO: 624 - protein, 15 aa, synthetic construct
TNTKDCHRIAQTGWV

SEQ ID NO: 625 - protein, 15 aa, synthetic construct
TYTEDWHRIAQTGWV

SEQ ID NO: 626 - protein, 15 aa, synthetic construct
TNNQNWHRIAQTGWV

SEQ ID NO: 627 - protein, 15 aa, synthetic construct
TNNQHWHRIAQTGWV

SEQ ID NO: 628 - protein, 15 aa, synthetic construct
TNNQDWHRITQTGWV

SEQ ID NO: 629 - protein, 15 aa, synthetic construct
TNRKTALHLAQTGWV

SEQ ID NO: 630 - protein, 15 aa, synthetic construct
NNNQDWHRIAQTGWV

SEQ ID NO: 631 - protein, 15 aa, synthetic construct
KNNQDWHRIAQTGWV

SEQ ID NO: 632 - protein, 15 aa, synthetic construct
TNTKDGHRIAQTGWV

SEQ ID NO: 633 - protein, 15 aa, synthetic construct
TNSQDWHRIAQTGWS

SEQ ID NO: 634 - protein, 15 aa, synthetic construct
TNNQDWHSIAHTGWV

SEQ ID NO: 635 - protein, 15 aa, synthetic construct
TNTKDWPRIAQTGWV

SEQ ID NO: 636 - protein, 15 aa, synthetic construct
TNNQDWHRIARTGWV

SEQ ID NO: 637 - protein, 15 aa, synthetic construct
TNTKDRHSIAQTGWV

SEQ ID NO: 638 - protein, 15 aa, synthetic construct
SNTQDWHRVPQTGWV

SEQ ID NO: 639 - protein, 15 aa, synthetic construct
TNNQDWHRIAKTGWV

SEQ ID NO: 640 - protein, 15 aa, synthetic construct
TNTKDWHRIAPTGWV

SEQ ID NO: 641 - protein, 15 aa, synthetic construct
SNTQDWHRIAQTGWA

SEQ ID NO: 642 - protein, 15 aa, synthetic construct
TNNRDWHRIAQTGWV

SEQ ID NO: 643 - protein, 15 aa, synthetic construct
TNNQDWHRIAQTRWV

SEQ ID NO: 644 - protein, 15 aa, synthetic construct
LNNQDWHRIAQTGWV

SEQ ID NO: 645 - protein, 15 aa, synthetic construct
TNNQDWHRIAHTGWV

SEQ ID NO: 646 - protein, 15 aa, synthetic construct
TNNQDWHRIGQTGWV

SEQ ID NO: 647 - protein, 15 aa, synthetic construct
TNTKDRQRIAQTGWV

SEQ ID NO: 648 - protein, 15 aa, synthetic construct
TNNQDWYRIAQTGWV

SEQ ID NO: 649 - protein, 15 aa, synthetic construct
TNNQDWHRIAQPGWV

SEQ ID NO: 650 - protein, 15 aa, synthetic construct
TNNQGWHRIAQTGWV

SEQ ID NO: 651 - protein, 15 aa, synthetic construct
SNNQDWHRIAQSGWV

SEQ ID NO: 652 - protein, 15 aa, synthetic construct
TNNQDWHRFAQTGWV

SEQ ID NO: 653 - protein, 15 aa, synthetic construct
SNNQDWHRMAQTGWV

SEQ ID NO: 654 - protein, 15 aa, synthetic construct
TNHQDWHRIAQTGWV

SEQ ID NO: 655 - protein, 15 aa, synthetic construct
TNNQDWHRTAQTGWV

SEQ ID NO: 656 - protein, 15 aa, synthetic construct
SNSQDWHRIAQTGWA

SEQ ID NO: 657 - protein, 15 aa, synthetic construct
TNNQDWHRIAQTGRV

SEQ ID NO: 658 - protein, 15 aa, synthetic construct
TNSKDGHRIAQTGWV

SEQ ID NO: 659 - protein, 15 aa, synthetic construct
SNNQDWHKIAQTGWV

SEQ ID NO: 660 - protein, 15 aa, synthetic construct
TNTKDWDRIAQTGWV

SEQ ID NO: 661 - protein, 15 aa, synthetic construct
TNNQDWQRIAHTGWV

SEQ ID NO: 662 - protein, 15 aa, synthetic construct
SNNQDWQRIAQTGWV

SEQ ID NO: 663 - protein, 15 aa, synthetic construct
TNTNDLHRIAQTGWV

SEQ ID NO: 664 - protein, 15 aa, synthetic construct
TNTQDWHTIAHTGWV

SEQ ID NO: 665 - protein, 15 aa, synthetic construct
SNNQDWNRIAQTGWV

SEQ ID NO: 666 - protein, 15 aa, synthetic construct
TNTQDWHKIAQTGWA

SEQ ID NO: 667 - protein, 15 aa, synthetic construct
TNNQDWHRIAQSGWV

SEQ ID NO: 668 - protein, 15 aa, synthetic construct
TNNQDWHTIAQTGWV

SEQ ID NO: 669 - protein, 15 aa, synthetic construct
TNSQDWHRIAGTGWV

SEQ ID NO: 670 - protein, 15 aa, synthetic construct
SNSQDWHRVAQTGWV

SEQ ID NO: 671 - protein, 15 aa, synthetic construct
TNNQDVHRIAQTGWV

SEQ ID NO: 672 - protein, 15 aa, synthetic construct
SNTQDWHRIAGTGWV

SEQ ID NO: 673 - protein, 15 aa, synthetic construct
TNNQDWHRSAQTGWV

SEQ ID NO: 674 - protein, 15 aa, synthetic construct
SNNQDGHRIAQTGWV

SEQ ID NO: 675 - protein, 15 aa, synthetic construct
ANNQDWQRIAQTGWV

SEQ ID NO: 676 - protein, 15 aa, synthetic construct
TNNQDWLRIAQTGWV

SEQ ID NO: 677 - protein, 15 aa, synthetic construct
TNNQDWRRIAQTGWV

SEQ ID NO: 678 - protein, 15 aa, synthetic construct
TNNQDWHWIAQTGWV

SEQ ID NO: 679 - protein, 15 aa, synthetic construct
TNNQDWHRMAQTGWV

SEQ ID NO: 680 - protein, 15 aa, synthetic construct
TNNQDWHRLAQTGWV

SEQ ID NO: 681 - protein, 15 aa, synthetic construct
SNTQDWHRIAQTGWI

SEQ ID NO: 682 - protein, 15 aa, synthetic construct
TNNQDWHRIAQTVWV

SEQ ID NO: 683 - protein, 15 aa, synthetic construct
TNTQDWHRIPQTGWA

SEQ ID NO: 684 - protein, 15 aa, synthetic construct
TNKQDGHRIAQTGWV

SEQ ID NO: 685 - protein, 15 aa, synthetic construct
TNTQDWHRTAQTGWA

SEQ ID NO: 686 - protein, 15 aa, synthetic construct
TNIQDWHRIAQTGWI

SEQ ID NO: 687 - protein, 15 aa, synthetic construct
TNNQDWHRIAQTGCV

SEQ ID NO: 688 - protein, 15 aa, synthetic construct
TNNQDWHRIVQTGWV

SEQ ID NO: 689 - protein, 15 aa, synthetic construct
TNNQDWHRIAQTGWL

SEQ ID NO: 690 - protein, 15 aa, synthetic construct
TNNQDWHRIAQTAWV

SEQ ID NO: 691 - protein, 15 aa, synthetic construct
TNNQDRHGIAQTGWV

SEQ ID NO: 692 - protein, 15 aa, synthetic construct
SGTQDWHRIAQTGWV

SEQ ID NO: 693 - protein, 15 aa, synthetic construct
THNQDWHRIAQTGWV

SEQ ID NO: 694 - protein, 15 aa, synthetic construct
TNSQDWHTIAHTGWV

SEQ ID NO: 695 - protein, 15 aa, synthetic construct
SNNQDWHRIAQTGGV

SEQ ID NO: 696 - protein, 15 aa, synthetic construct
TNNQDGHRIAQSGWV

SEQ ID NO: 697 - protein, 15 aa, synthetic construct
TNNQDWHRIAQNGWV

SEQ ID NO: 698 - protein, 15 aa, synthetic construct
TNNQDSQRIAQTGWV

SEQ ID NO: 699 - protein, 15 aa, synthetic construct
SNNQDWHRIAQTGSV

SEQ ID NO: 700 - protein, 15 aa, synthetic construct
TNSQDWHRIAQTNWV

SEQ ID NO: 701 - protein, 15 aa, synthetic construct
SNNQDWHRIAETGWV

SEQ ID NO: 702 - protein, 15 aa, synthetic construct
SNNQDSHRIAQTGWV

SEQ ID NO: 703 - protein, 15 aa, synthetic construct
TNIQDWHRIANTGWV

SEQ ID NO: 704 - protein, 15 aa, synthetic construct
TNSNDWHRIAQTGWV

SEQ ID NO: 705 - protein, 15 aa, synthetic construct
SNTQDWHRIANTGWV

SEQ ID NO: 706 - protein, 15 aa, synthetic construct
TNNQHWQRIAQTGWV

SEQ ID NO: 707 - protein, 15 aa, synthetic construct
TYNQDWQRIAQTGWV

SEQ ID NO: 708 - protein, 15 aa, synthetic construct
TNNQDWHRIEQTGWV

SEQ ID NO: 709 - protein, 15 aa, synthetic construct
TNNQDWHRIAQTSWV

SEQ ID NO: 710 - protein, 15 aa, synthetic construct
RNTQDWHRISQTGWV

SEQ ID NO: 711 - protein, 15 aa, synthetic construct
TNTQDWHTIAQTGWA

SEQ ID NO: 712 - protein, 15 aa, synthetic construct
TNQQDWHRIAQTGWV

SEQ ID NO: 713 - protein, 15 aa, synthetic construct
RNIQDWHRIAQTGWV

SEQ ID NO: 714 - protein, 15 aa, synthetic construct
TSTQDWHRVSQTGWV

SEQ ID NO: 715 - protein, 15 aa, synthetic construct
TNKQDWHRIEQTGWV

SEQ ID NO: 716 - protein, 15 aa, synthetic construct
TNNPDWHRIAQTGWV

SEQ ID NO: 717 - protein, 15 aa, synthetic construct
SNNQDWHRIAQAGWV

SEQ ID NO: 718 - protein, 15 aa, synthetic construct
TNNQDYHRIAQTGWV

SEQ ID NO: 719 - protein, 15 aa, synthetic construct
TITEDWHRIAQTGWV

SEQ ID NO: 720 - protein, 15 aa, synthetic construct
TNTNDWHRIAQTGWV

SEQ ID NO: 721 - protein, 15 aa, synthetic construct
TNNQDWHRIAQTDWV

SEQ ID NO: 722 - protein, 15 aa, synthetic construct
SNTQDWHRIPQTGWV

SEQ ID NO: 723 - protein, 15 aa, synthetic construct
TNNQDWHRIAQTGSV

SEQ ID NO: 724 - protein, 15 aa, synthetic construct
SNNQDRHRIAQTGWV

SEQ ID NO: 725 - protein, 15 aa, synthetic construct
TNNQDWQRISQTGWV

SEQ ID NO: 726 - protein, 15 aa, synthetic construct
TNNQDWKRIAQTGWV

SEQ ID NO: 727 - protein, 15 aa, synthetic construct
TNNEDRHRIAQTGWV

SEQ ID NO: 728 - protein, 15 aa, synthetic construct
STTQDWHRISQTGWV

SEQ ID NO: 729 - protein, 15 aa, synthetic construct
TFSQDWHRIAQTGWV

SEQ ID NO: 730 - protein, 15 aa, synthetic construct
RNSQDWHRIAQTGWV

SEQ ID NO: 731 - protein, 15 aa, synthetic construct
INTQDWHRIAQTGWA

SEQ ID NO: 732 - protein, 15 aa, synthetic construct
TNNQDRHRIAQTGWV

SEQ ID NO: 733 - protein, 15 aa, synthetic construct
RNTEDWHRIAQTGWV

SEQ ID NO: 734 - protein, 15 aa, synthetic construct
TNNQDWHRIAQIGWV

SEQ ID NO: 735 - protein, 15 aa, synthetic construct
TNNHDWHRIAQTGWV

SEQ ID NO: 736 - protein, 15 aa, synthetic construct
SNTQDWHRVSQTGWV

SEQ ID NO: 737 - protein, 15 aa, synthetic construct
TNSQDWHRVPQTGWV

SEQ ID NO: 738 - protein, 15 aa, synthetic construct
RTTQDWHRIAQTGWV

SEQ ID NO: 739 - protein, 15 aa, synthetic construct
TNYQDWQRIAQTGWV

SEQ ID NO: 740 - protein, 15 aa, synthetic construct
SNIEDWHRIAQTGWV

SEQ ID NO: 741 - protein, 15 aa, synthetic construct
TNNQDRHSIAQTGWV

SEQ ID NO: 742 - protein, 15 aa, synthetic construct
RNTQDWHRIAQTGWA

SEQ ID NO: 743 - protein, 15 aa, synthetic construct
TNNQDGHRIAQTGSV

SEQ ID NO: 744 - protein, 13 aa, synthetic construct
ATNTQDWHRIAQT

SEQ ID NO: 745 - DNA, 39 bp, synthetic construct
  source 1..39: mol_type = other DNA
gctacaaacacccaggactggcacaggattgcgcagacc

SEQ ID NO: 746 - protein, 9 aa, synthetic construct
TNTQDWHRI

SEQ ID NO: 747 - DNA, 27 bp, synthetic construct
  source 1..27: mol_type = other DNA
acaaacacccaggactggcacaggatt

SEQ ID NO: 748 - protein, 13 aa, synthetic construct
VTNTQDWHRIAQT

SEQ ID NO: 749 - protein, 13 aa, synthetic construct
TTNTQDWHRIAQT

SEQ ID NO: 750-939 - skipped (190 entries)

SEQ ID NO: 940 - protein, 7 aa, synthetic construct
TQDWHRI

SEQ ID NO: 941 - protein, 7 aa, synthetic construct
TQDWHRI

SEQ ID NO: 942 - DNA, 21 bp, synthetic construct
  source 1..21: mol_type = other DNA
acccaggactggcacaggatt

SEQ ID NO: 943-980 - skipped (38 entries)

SEQ ID NO: 981 - protein, 736 aa, synthetic construct
MAADGYLPDWLEDNLSEGIREWWALKPGAPQPKANQQHQDNARGLVLPGYKYLGPGNGLDKGEPVNAADAAALEHDKAYDQQLKAGDNPYLKYNHADAEFQERLKEDTSFGGNLGRAVFQAKKRLLEPLGLVEEAAKTAPGKKRPVEQSPQEPDSSAGIGKSGAQPAKKRLNFGQTGDTESVPDPQPIGEPPAAPSGVGSLTMASGGGAPVADNNEGADGVGSSSGNWHCDSQWLGDRVITTSTRTWALPTYNNHLYKQISNSTSGGSSNDNAYFGYSTPWGYFDFNRFHCHFSPRDWQRLINNNWGFRPKRLNFKLFNIQVKEVTDNNGVKTIANNLTSTVQVFTDSDYQLPYVLGSAHEGCLPPFPADVFMIPQYGYLTLNDGSQAVGRSSFYCLEYFPSQMLRTGNNFQFSYEFENVPFHSSYAHSQSLDRLMNPLIDQYLYYLSKTINGSGQNQQTLKFSVAGPSNMAVQGRNYIPGPSYRQQRVSTTVTQNNNSEFAWPGASSWALNGRNSLMNPGPAMASHKEGEDRFFPLSGSLIFGKQGTGRDNVDADKVMITNEEEIKTTNPVATESYGQVATNTQDWHRIAQTGWVQNQGILPGMVWQDRDVYLQGPIWAKIPHTDGNFHPSPLMGGFGMKHPPPQILIKNTPVPADPPTAFNKDKLNSFITQYSTGQVSVEIEWELQKENSKRWNPEIQYTSNYYKSNNVEFAVNTEGVYSEPRPIGTRYLTRNL

SEQ ID NO: 982 - skipped

SEQ ID NO: 983 - DNA, 2211 bp, synthetic construct
  source 1..2211: mol_type = other DNA
atggctgccgatggttatcttccagattggctcgaggacaaccttagtgaaggaattcgcgagtggtgggctttgaaacctggagcccctcaacccaaggcaaatcaacaacatcaagacaacgctcgaggtcttgtgcttccgggttacaaataccttggacccggcaacggactcgacaagggggagccggtcaacgcagcagacgcggcggccctcgagcacgacaaggcctacgaccagcagctcaaggccggagacaacccgtacctcaagtacaaccacgccgacgccgagttccaggagcggctcaaagaagatacgtcttttgggggcaacctcgggcgagcagtcttccaggccaaaaagaggcttcttgaacctcttggtctggttgaggaagcggctaagacggctcctggaaagaagaggcctgtagagcagtctcctcaggaaccggactcctccgcgggtattggcaaatcgggtgcacagcccgctaaaaagagactcaatttcggtcagactggcgacacagagtcagtcccagaccctcaaccaatcggagaacctcccgcagccccctcaggtgtgggatctcttacaatggcttcaggtggtggcgcaccagtggcagacaataacgaaggtgccgatggagtgggtagttcctcgggaaattggcattgcgattcccaatggctgggggacagagtcatcaccaccagcacccgaacctgggccctgcccacctacaacaatcacctctacaagcaaatctccaacagcacatctggaggatcttcaaatgacaacgcctacttcggctacagcaccccctgggggtattttgacttcaacagattccactgccacttctcaccacgtgactggcagcgactcatcaacaacaactggggattccggcctaagcgactcaacttcaagctcttcaacattcaggtcaaagaggttacggacaacaatggagtcaagaccatcgccaataaccttaccagcacggtccaggtcttcacggactcagactatcagctcccgtacgtgctcgggtcggctcacgagggctgcctcccgccgttcccagcggacgttttcatgattcctcagtacgggtatctgacgcttaatgatggaagccaggccgtgggtcgttcgtccttttactgcctggaatatttcccgtcgcaaatgctaagaacgggtaacaacttccagttcagctacgagtttgagaacgtacctttccatagcagctacgctcacagccaaagcctggaccgactaatgaatccactcatcgaccaatacttgtactatctctcaaagactattaacggttctggacagaatcaacaaacgctaaaattcagtgtggccggacccagcaacatggctgtccagggaagaaactacatacctggacccagctaccgacaacaacgtgtctcaaccactgtgactcaaaacaacaacagcgaatttgcttggcctggagcttcttcttgggctctcaatggacgtaatagcttgatgaatcctggacctgctatggccagccacaaagaaggagaggaccgtttctttcctttgtctggatctttaatttttggcaaacaaggaactggaagagacaacgtggatgcggacaaagtcatgataaccaacgaagaagaaattaaaactactaacccggtagcaacggagtcctatggacaggtcgctacaaacacccaggactggcacaggattgcgcagaccggctgggttcaaaaccaaggaatacttccgggtatggtttggcaggacagagatgtgtacctgcaaggacccatttgggccaaaattcctcacacggacggcaactttcacccttctccgctgatgggagggtttggaatgaagcacccgcctcctcagatcctcatcaaaaacacacctgtacctgccgatcctccaacggccttcaacaaggacaagctgaactctttcatcacccagtattctactggccaagtcagcgtggagatcgagtgggagctgcagaaggaaaacagcaagcggtggaacccggagatccagtacacttccaactattacaagtctaataatgttgaatttgctgttaatactgaaggtgtatatagtgaaccccgccccattggcaccagatacctgactcgtaatctgtaa

SEQ ID NO: 984-986 - skipped (3 entries)

SEQ ID NO: 987 - DNA, 1184 bp, synthetic construct
  source 1..1184: mol_type = other DNA
cgtgaggctccggtgcccgtcagtgggcagagcgcacatcgcccacagtccccgagaagttggggggaggggtcggcaattgaaccggtgcctagagaaggtggcgcggggtaaactgggaaagtgatgtcgtgtactggctccgcctttttcccgagggtgggggagaaccgtatataagtgcagtagtcgccgtgaacgttctttttcgcaacgggtttgccgccagaacacaggtaagtgccgtgtgtggttcccgcgggcctggcctctttacgggttatggcccttgcgtgccttgaattacttccacctggctgcagtacgtgattcttgatcccgagcttcgggttggaagtgggtgggagagttcgaggccttgcgcttaaggagccccttcgcctcgtgcttgagttgaggcctggcctgggcgctggggccgccgcgtgcgaatctggtggcaccttcgcgcctgtctcgctgctttcgataagtctctagccatttaaaatttttgatgacctgctgcgacgctttttttctggcaagatagtcttgtaaatgcgggccaagatctgcacactggtatttcggtttttggggccgcgggcggcgacggggcccgtgcgtcccagcgcacatgttcggcgaggcggggcctgcgagcgcggccaccgagaatcggacgggggtagtctcaagctggccggcctgctctggtgcctggcctcgcgccgccgtgtatcgccccgccctgggcggcaaggctggcccggtcggcaccagttgcgtgagcggaaagatggccgcttcccggccctgctgcagggagctcaaaatggaggacgcggcgctcgggagagcgggcgggtgagtcacccacacaaaggaaaagggcctttccgtcctcagccgtcgcttcatgtgactccacggagtaccgggcgccgtccaggcacctcgattagttctcgagcttttggagtacgtcgtctttaggttggggggaggggttttatgcgatggagtttccccacactgagtgggtggagactgaagttaggccagcttggcacttgatgtaattctccttggaatttgccctttttgagtttggatcttggttcattctcaagcctcagacagtggttcaaagtttttttcttccatttcaggtgtcgtga

SEQ ID NO: 988 - DNA, 227 bp, synthetic construct
  source 1..227: mol_type = other DNA
gcccgtcagtgggcagagcgcacatcgcccacagtccccgagaagttggggggaggggtcggcaattgaaccggtgcctagagaaggtggcgcggggtaaactgggaaagtgatgtcgtgtactggctccgcctttttcccgagggtgggggagaaccgtatataagtgcagtagtcgccgtgaacgttctttttcgcaacgggtttgccgccagaacacgcgtaag

SEQ ID NO: 989 - skipped

SEQ ID NO: 990 - DNA, 16 bp, synthetic construct
  source 1..16: mol_type = other DNA
ggtggagaagagcatg

SEQ ID NO: 991 - DNA, 27 bp, synthetic construct
  source 1..27: mol_type = other DNA
gtcatcactgaggtggagaagagcatg

SEQ ID NO: 992-994 - skipped (3 entries)

SEQ ID NO: 995 - DNA, 222 bp, synthetic construct
  source 1..222: mol_type = other DNA
gcccgtcagtgggcagagcgcacatcgcccacagtccccgagaagttggggggaggggtcggcaattgaaccggtgcctagagaaggtggcgcggggtaaactgggaaagtgatgtcgtgtactggctccgcctttttcccgagggtgggggagaaccgtatataagtgcagtagtcgccgtgaacgttctttttcgcaacgggtttgccgccagaacacag

SEQ ID NO: 996 - DNA, 222 bp, synthetic construct
  source 1..222: mol_type = other DNA
gcccgtcagtgggcagagcgcacatcgcccacagtccccgagaagttggggggaggggtcggcaattgaaccggtgcctagagaaggtggcgcggggtaaactgggaaagtgatgtcgtgtactggctccgcctttttcccgagggtgggggagaaccgtatataagtgcagtagtcgccgtgaacgttctttttcgcaacgggtttgccgccagaacacgc

SEQ ID NO: 997 - skipped

SEQ ID NO: 998 - DNA, 229 bp, synthetic construct
  source 1..229: mol_type = other DNA
gtgcccgtcagtgggcagagcgcacatcgcccacagtccccgagaagttggggggaggggtcggcaattgaaccggtgcctagagaaggtggcgcggggtaaactgggaaagtgatgtcgtgtactggctccgcctttttcccgagggtgggggagaaccgtatataagtgcagtagtcgccgtgaacgttctttttcgcaacgggtttgccgccagaacacgcgtaag

SEQ ID NO: 999 - DNA, 235 bp, synthetic construct
  source 1..235: mol_type = other DNA
gctccggtgcccgtcagtgggcagagcgcacatcgcccacagtccccgagaagttggggggaggggtcggcaattgaaccggtgcctagagaaggtggcgcggggtaaactgggaaagtgatgtcgtgtactggctccgcctttttcccgagggtgggggagaaccgtatataagtgcagtagtcgccgtgaacgttctttttcgcaacgggtttgccgccagaacacgcgtaag

SEQ ID NO: 1000 - DNA, 241 bp, synthetic construct
  source 1..241: mol_type = other DNA
cgtgaggctccggtgcccgtcagtgggcagagcgcacatcgcccacagtccccgagaagttggggggaggggtcggcaattgaaccggtgcctagagaaggtggcgcggggtaaactgggaaagtgatgtcgtgtactggctccgcctttttcccgagggtgggggagaaccgtatataagtgcagtagtcgccgtgaacgttctttttcgcaacgggtttgccgccagaacacgcgtaag

SEQ ID NO: 1001 - DNA, 236 bp, synthetic construct
  source 1..236: mol_type = other DNA
cgtgaggctccggtgcccgtcagtgggcagagcgcacatcgcccacagtccccgagaagttggggggaggggtcggcaattgaaccggtgcctagagaaggtggcgcggggtaaactgggaaagtgatgtcgtgtactggctccgcctttttcccgagggtgggggagaaccgtatataagtgcagtagtcgccgtgaacgttctttttcgcaacgggtttgccgccagaacacag

SEQ ID NO: 1002 - DNA, 246 bp, synthetic construct
  source 1..246: mol_type = other DNA
gcatgcgtgaggctccggtgcccgtcagtgggcagagcgcacatcgcccacagtccccgagaagttggggggaggggtcggcaattgaaccggtgcctagagaaggtggcgcggggtaaactgggaaagtgatgtcgtgtactggctccgcctttttcccgagggtgggggagaaccgtatataagtgcagtagtcgccgtgaacgttctttttcgcaacgggtttgccgccagaacacgcgtaag

SEQ ID NO: 1003 - DNA, 241 bp, synthetic construct
  source 1..241: mol_type = other DNA
gcatgcgtgaggctccggtgcccgtcagtgggcagagcgcacatcgcccacagtccccgagaagttggggggaggggtcggcaattgaaccggtgcctagagaaggtggcgcggggtaaactgggaaagtgatgtcgtgtactggctccgcctttttcccgagggtgggggagaaccgtatataagtgcagtagtcgccgtgaacgttctttttcgcaacgggtttgccgccagaacacag

SEQ ID NO: 1004 - DNA, 257 bp, synthetic construct
  source 1..257: mol_type = other DNA
ggtggagaagagcatgcgtgaggctccggtgcccgtcagtgggcagagcgcacatcgcccacagtccccgagaagttggggggaggggtcggcaattgaaccggtgcctagagaaggtggcgcggggtaaactgggaaagtgatgtcgtgtactggctccgcctttttcccgagggtgggggagaaccgtatataagtgcagtagtcgccgtgaacgttctttttcgcaacgggtttgccgccagaacacgcgtaag

SEQ ID NO: 1005 - DNA, 252 bp, synthetic construct
  source 1..252: mol_type = other DNA
ggtggagaagagcatgcgtgaggctccggtgcccgtcagtgggcagagcgcacatcgcccacagtccccgagaagttggggggaggggtcggcaattgaaccggtgcctagagaaggtggcgcggggtaaactgggaaagtgatgtcgtgtactggctccgcctttttcccgagggtgggggagaaccgtatataagtgcagtagtcgccgtgaacgttctttttcgcaacgggtttgccgccagaacacag

SEQ ID NO: 1006 - DNA, 268 bp, synthetic construct
  source 1..268: mol_type = other DNA
gtcatcactgaggtggagaagagcatgcgtgaggctccggtgcccgtcagtgggcagagcgcacatcgcccacagtccccgagaagttggggggaggggtcggcaattgaaccggtgcctagagaaggtggcgcggggtaaactgggaaagtgatgtcgtgtactggctccgcctttttcccgagggtgggggagaaccgtatataagtgcagtagtcgccgtgaacgttctttttcgcaacgggtttgccgccagaacacgcgtaag

SEQ ID NO: 1007 - DNA, 263 bp, synthetic construct
  source 1..263: mol_type = other DNA
gtcatcactgaggtggagaagagcatgcgtgaggctccggtgcccgtcagtgggcagagcgcacatcgcccacagtccccgagaagttggggggaggggtcggcaattgaaccggtgcctagagaaggtggcgcggggtaaactgggaaagtgatgtcgtgtactggctccgcctttttcccgagggtgggggagaaccgtatataagtgcagtagtcgccgtgaacgttctttttcgcaacgggtttgccgccagaacacag

SEQ ID NO: 1008-1261 - skipped (254 entries)

SEQ ID NO: 1262 - protein, 7 aa, synthetic construct
TLAVPFK

SEQ ID NO: 1263-4672 - skipped (3410 entries)

SEQ ID NO: 4673 - DNA, 23 bp, synthetic construct
  source 1..23: mol_type = other DNA
acaaacaccattgtcacactcca

SEQ ID NO: 4674 - DNA, 71 bp, synthetic construct
  source 1..71: mol_type = other DNA
acaaacaccattgtcacactccacacaaacaccattgtcacactccacacaaacaccattgtcacactcca

SEQ ID NO: 4675 - DNA, 23 bp, synthetic construct
  source 1..23: mol_type = other DNA
tccataaagtaggaaacactaca

SEQ ID NO: 4676 - DNA, 22 bp, synthetic construct
  source 1..22: mol_type = other DNA
agtgaattctaccagtgccata

SEQ ID NO: 4677 - DNA, 24 bp, synthetic construct
  source 1..24: mol_type = other DNA
agtgtgagttctaccattgccaaa

SEQ ID NO: 4678 - DNA, 23 bp, synthetic construct
  source 1..23: mol_type = other DNA
agcaaaaatgtgctagtgccaaa

SEQ ID NO: 4679 - DNA, 22 bp, synthetic construct
  source 1..22: mol_type = other DNA
atacatacttctttacattcca

SEQ ID NO: 4680 - protein, 15 aa, synthetic construct
TNTKDWHRVAQTGWV

SEQ ID NO: 4681 - protein, 11 aa, synthetic construct
  VARIANT 1: note = Any amino acid
  VARIANT 2: note = Any amino acid
  VARIANT 3: note = Any amino acid
  VARIANT 4: note = Q, K, E, S, P, R, N, H, or a conservative substitution thereof
  VARIANT 9: note = I, V, T, M, S, N, L, F, or a conservative substitution thereof
  VARIANT 10: note = Any amino acid
  VARIANT 11: note = Any amino acid
XXXXDWHRXXX

SEQ ID NO: 4682 - protein, 4 aa, synthetic construct
DWHR

SEQ ID NO: 4683 - protein, 11 aa, synthetic construct
  VARIANT 1: note = Any amino acid
  VARIANT 2: note = Any amino acid
  VARIANT 3: note = Any amino acid
  VARIANT 4: note = Q, P, or a conservative substitution thereof
  VARIANT 9: note = I, V, or a conservative substitution thereof
  VARIANT 10: note = Any amino acid
  VARIANT 11: note = Any amino acid
XXXXDWHRXXX

SEQ ID NO: 4684 - protein, 4 aa, synthetic construct
TQDW

SEQ ID NO: 4685 - protein, 5 aa, synthetic construct
TQDWH

SEQ ID NO: 4686 - protein, 6 aa, synthetic construct
TQDWHR

SEQ ID NO: 4687 - protein, 7 aa, synthetic construct
AQAQAQT

SEQ ID NO: 4688 - protein, 4 aa, synthetic construct
TNTQ

SEQ ID NO: 4689 - protein, 4 aa, synthetic construct
TNTK

SEQ ID NO: 4690 - protein, 4 aa, synthetic construct
TNNQ

SEQ ID NO: 4691 - protein, 4 aa, synthetic construct
SNNQ

SEQ ID NO: 4692 - protein, 4 aa, synthetic construct
TNKQ

SEQ ID NO: 4693 - protein, 4 aa, synthetic construct
TNNE

SEQ ID NO: 4694 - protein, 4 aa, synthetic construct
SNKQ

SEQ ID NO: 4695 - protein, 4 aa, synthetic construct
SNTQ

SEQ ID NO: 4696 - protein, 4 aa, synthetic construct
TTNQ

SEQ ID NO: 4697 - protein, 4 aa, synthetic construct
TNDQ

SEQ ID NO: 4698 - protein, 4 aa, synthetic construct
TTIQ

SEQ ID NO: 4699 - protein, 4 aa, synthetic construct
RNTQ

SEQ ID NO: 4700 - protein, 4 aa, synthetic construct
TTKQ

SEQ ID NO: 4701 - protein, 4 aa, synthetic construct
TTSQ

SEQ ID NO: 4702 - protein, 4 aa, synthetic construct
TTDQ

SEQ ID NO: 4703 - protein, 4 aa, synthetic construct
TNPS

SEQ ID NO: 4704 - protein, 4 aa, synthetic construct
TNKE

SEQ ID NO: 4705 - protein, 4 aa, synthetic construct
TTTQ

SEQ ID NO: 4706 - protein, 4 aa, synthetic construct
TGKQ

SEQ ID NO: 4707 - protein, 4 aa, synthetic construct
TTAQ

SEQ ID NO: 4708 - protein, 4 aa, synthetic construct
TVKQ

SEQ ID NO: 4709 - protein, 4 aa, synthetic construct
TNYQ

SEQ ID NO: 4710 - protein, 4 aa, synthetic construct
TNTP

SEQ ID NO: 4711 - protein, 4 aa, synthetic construct
STKQ

SEQ ID NO: 4712 - protein, 4 aa, synthetic construct
TTEQ

SEQ ID NO: 4713 - protein, 4 aa, synthetic construct
TSKQ

SEQ ID NO: 4714 - protein, 4 aa, synthetic construct
TNIQ

SEQ ID NO: 4715 - protein, 4 aa, synthetic construct
TYNQ

SEQ ID NO: 4716 - protein, 4 aa, synthetic construct
STIQ

SEQ ID NO: 4717 - protein, 4 aa, synthetic construct
TTVQ

SEQ ID NO: 4718 - protein, 4 aa, synthetic construct
TGTQ

SEQ ID NO: 4719 - protein, 4 aa, synthetic construct
TNTR

SEQ ID NO: 4720 - protein, 4 aa, synthetic construct
TTLQ

SEQ ID NO: 4721 - protein, 4 aa, synthetic construct
TTMQ

SEQ ID NO: 4722 - protein, 4 aa, synthetic construct
ANNQ

SEQ ID NO: 4723 - protein, 4 aa, synthetic construct
SNIQ

SEQ ID NO: 4724 - protein, 4 aa, synthetic construct
TKNQ

SEQ ID NO: 4725 - protein, 4 aa, synthetic construct
TYTQ

SEQ ID NO: 4726 - protein, 4 aa, synthetic construct
TNKS

SEQ ID NO: 4727 - protein, 4 aa, synthetic construct
SNTE

SEQ ID NO: 4728 - protein, 4 aa, synthetic construct
TNTE

SEQ ID NO: 4729 - protein, 4 aa, synthetic construct
TNIE

SEQ ID NO: 4730 - protein, 4 aa, synthetic construct
TTRQ

SEQ ID NO: 4731 - protein, 4 aa, synthetic construct
TNSQ

SEQ ID NO: 4732 - protein, 4 aa, synthetic construct
TYTK

SEQ ID NO: 4733 - protein, 4 aa, synthetic construct
TTTK

SEQ ID NO: 4734 - protein, 4 aa, synthetic construct
TNIK

SEQ ID NO: 4735 - protein, 4 aa, synthetic construct
SNTK

SEQ ID NO: 4736 - protein, 4 aa, synthetic construct
TNNK

SEQ ID NO: 4737 - protein, 4 aa, synthetic construct
TNSK

SEQ ID NO: 4738 - protein, 4 aa, synthetic construct
TSTK

SEQ ID NO: 4739 - protein, 4 aa, synthetic construct
TITK

SEQ ID NO: 4740 - protein, 4 aa, synthetic construct
INTK

SEQ ID NO: 4741 - protein, 4 aa, synthetic construct
TNAK

SEQ ID NO: 4742 - protein, 4 aa, synthetic construct
TKTK

SEQ ID NO: 4743 - protein, 4 aa, synthetic construct
STNQ

SEQ ID NO: 4744 - protein, 4 aa, synthetic construct
ANTK

SEQ ID NO: 4745 - protein, 4 aa, synthetic construct
RNNQ

SEQ ID NO: 4746 - protein, 4 aa, synthetic construct
TGNQ

SEQ ID NO: 4747 - protein, 4 aa, synthetic construct
TSNQ

SEQ ID NO: 4748 - protein, 4 aa, synthetic construct
THTK

SEQ ID NO: 4749 - protein, 4 aa, synthetic construct
TDTK

SEQ ID NO: 4750 - protein, 4 aa, synthetic construct
TNEQ

SEQ ID NO: 4751 - protein, 4 aa, synthetic construct
CNTQ

SEQ ID NO: 4752 - protein, 4 aa, synthetic construct
TNPK

SEQ ID NO: 4753 - protein, 4 aa, synthetic construct
INNQ

SEQ ID NO: 4754 - protein, 4 aa, synthetic construct
TYTE

SEQ ID NO: 4755 - protein, 4 aa, synthetic construct
NNNQ

SEQ ID NO: 4756 - protein, 4 aa, synthetic construct
KNNQ

SEQ ID NO: 4757 - protein, 4 aa, synthetic construct
TNNR

SEQ ID NO: 4758 - protein, 4 aa, synthetic construct
LNNQ

SEQ ID NO: 4759 - protein, 4 aa, synthetic construct
TINQ

SEQ ID NO: 4760 - protein, 4 aa, synthetic construct
TNHQ

SEQ ID NO: 4761 - protein, 4 aa, synthetic construct
STTQ

SEQ ID NO: 4762 - protein, 4 aa, synthetic construct
SNSQ

SEQ ID NO: 4763 - protein, 4 aa, synthetic construct
STSQ

SEQ ID NO: 4764 - protein, 4 aa, synthetic construct
TYIQ

SEQ ID NO: 4765 - protein, 4 aa, synthetic construct
SGTQ

SEQ ID NO: 4766 - protein, 4 aa, synthetic construct
THNQ

SEQ ID NO: 4767 - protein, 4 aa, synthetic construct
TITQ

SEQ ID NO: 4768 - protein, 4 aa, synthetic construct
TSTQ

SEQ ID NO: 4769 - protein, 4 aa, synthetic construct
TNSN

SEQ ID NO: 4770 - protein, 4 aa, synthetic construct
TNQQ

SEQ ID NO: 4771 - protein, 4 aa, synthetic construct
RNIQ

SEQ ID NO: 4772 - protein, 4 aa, synthetic construct
TNNP

SEQ ID NO: 4773 - protein, 4 aa, synthetic construct
TITE

SEQ ID NO: 4774 - protein, 4 aa, synthetic construct
TNTN

SEQ ID NO: 4775 - protein, 4 aa, synthetic construct
TFSQ

SEQ ID NO: 4776 - protein, 4 aa, synthetic construct
RNSQ

SEQ ID NO: 4777 - protein, 4 aa, synthetic construct
INTQ

SEQ ID NO: 4778 - protein, 4 aa, synthetic construct
RNTE

SEQ ID NO: 4779 - protein, 4 aa, synthetic construct
TNNH

SEQ ID NO: 4780 - protein, 4 aa, synthetic construct
TNMQ

SEQ ID NO: 4781 - protein, 4 aa, synthetic construct
RTTQ

SEQ ID NO: 4782 - protein, 4 aa, synthetic construct
SNIE

SEQ ID NO: 4783 - protein, 4 aa, synthetic construct
TNTS

SEQ ID NO: 4784 - protein, 4 aa, synthetic construct
KNTQ

SEQ ID NO: 4785 - protein, 4 aa, synthetic construct
TNLQ

SEQ ID NO: 4786 - protein, 4 aa, synthetic construct
TSMQ

SEQ ID NO: 4787 - protein, 4 aa, synthetic construct
SYTQ

SEQ ID NO: 4788 - protein, 4 aa, synthetic construct
TNCQ

SEQ ID NO: 4789 - protein, 4 aa, synthetic construct
SSTQ

SEQ ID NO: 4790 - protein, 4 aa, synthetic construct
TVTQ

SEQ ID NO: 4791 - protein, 4 aa, synthetic construct
QNTQ

SEQ ID NO: 4792 - protein, 6 aa, synthetic construct
TKDWHR

SEQ ID NO: 4793 - protein, 6 aa, synthetic construct
NQDWHR

SEQ ID NO: 4794 - protein, 6 aa, synthetic construct
KQDWHR

SEQ ID NO: 4795 - protein, 6 aa, synthetic construct
NEDWHR

SEQ ID NO: 4796 - protein, 6 aa, synthetic construct
DQDWHR

SEQ ID NO: 4797 - protein, 6 aa, synthetic construct
IQDWHR

SEQ ID NO: 4798 - protein, 6 aa, synthetic construct
SQDWHR

SEQ ID NO: 4799 - protein, 6 aa, synthetic construct
PSDWHR

SEQ ID NO: 4800 - protein, 6 aa, synthetic construct
KEDWHR

SEQ ID NO: 4801 - protein, 6 aa, synthetic construct
AQDWHR

SEQ ID NO: 4802 - protein, 6 aa, synthetic construct
YQDWHR

SEQ ID NO: 4803 - protein, 6 aa, synthetic construct
TPDWHR

SEQ ID NO: 4804 - protein, 6 aa, synthetic construct
EQDWHR

SEQ ID NO: 4805 - protein, 6 aa, synthetic construct
VQDWHR

SEQ ID NO: 4806 - protein, 6 aa, synthetic construct
TRDWHR

SEQ ID NO: 4807 - protein, 6 aa, synthetic construct
LQDWHR

SEQ ID NO: 4808 - protein, 6 aa, synthetic construct
MQDWHR

SEQ ID NO: 4809 - protein, 6 aa, synthetic construct
KSDWHR

SEQ ID NO: 4810 - protein, 6 aa, synthetic construct
TEDWHR

SEQ ID NO: 4811 - protein, 6 aa, synthetic construct
IEDWHR

SEQ ID NO: 4812 - protein, 6 aa, synthetic construct
RQDWHR

SEQ ID NO: 4813 - protein, 6 aa, synthetic construct
IKDWHR

SEQ ID NO: 4814 - protein, 6 aa, synthetic construct
NKDWHR

SEQ ID NO: 4815 - protein, 6 aa, synthetic construct
SKDWHR

SEQ ID NO: 4816 - protein, 6 aa, synthetic construct
AKDWHR

SEQ ID NO: 4817 - protein, 6 aa, synthetic construct
PKDWHR

SEQ ID NO: 4818 - protein, 6 aa, synthetic construct
NRDWHR

SEQ ID NO: 4819 - protein, 6 aa, synthetic construct
HQDWHR

SEQ ID NO: 4820 - protein, 6 aa, synthetic construct
SNDWHR

SEQ ID NO: 4821 - protein, 6 aa, synthetic construct
QQDWHR

SEQ ID NO: 4822 - protein, 6 aa, synthetic construct
NPDWHR

SEQ ID NO: 4823 - protein, 6 aa, synthetic construct
TNDWHR

SEQ ID NO: 4824 - protein, 6 aa, synthetic construct
NHDWHR

SEQ ID NO: 4825 - protein, 6 aa, synthetic construct
TSDWHR

SEQ ID NO: 4826 - protein, 6 aa, synthetic construct
CQDWHR

SEQ ID NO: 4827 - protein, 7 aa, synthetic construct
NTQDWHR

SEQ ID NO: 4828 - protein, 7 aa, synthetic construct
NTKDWHR

SEQ ID NO: 4829 - protein, 7 aa, synthetic construct
NNQDWHR

SEQ ID NO: 4830 - protein, 7 aa, synthetic construct
NKQDWHR

SEQ ID NO: 4831 - protein, 7 aa, synthetic construct
NNEDWHR

SEQ ID NO: 4832 - protein, 7 aa, synthetic construct
TNQDWHR

SEQ ID NO: 4833 - protein, 7 aa, synthetic construct
NDQDWHR

SEQ ID NO: 4834 - protein, 7 aa, synthetic construct
TIQDWHR

SEQ ID NO: 4835 - protein, 7 aa, synthetic construct
TKQDWHR

SEQ ID NO: 4836 - protein, 7 aa, synthetic construct
TSQDWHR

SEQ ID NO: 4837 - protein, 7 aa, synthetic construct
TDQDWHR

SEQ ID NO: 4838 - protein, 7 aa, synthetic construct
NPSDWHR

SEQ ID NO: 4839 - protein, 7 aa, synthetic construct
NKEDWHR

SEQ ID NO: 4840 - protein, 7 aa, synthetic construct
TTQDWHR

SEQ ID NO: 4841 - protein, 7 aa, synthetic construct
GKQDWHR

SEQ ID NO: 4842 - protein, 7 aa, synthetic construct
TAQDWHR

SEQ ID NO: 4843 - protein, 7 aa, synthetic construct
VKQDWHR

SEQ ID NO: 4844 - protein, 7 aa, synthetic construct
NYQDWHR

SEQ ID NO: 4845 - protein, 7 aa, synthetic construct
NTPDWHR

SEQ ID NO: 4846 - protein, 7 aa, synthetic construct
TEQDWHR

SEQ ID NO: 4847 - protein, 7 aa, synthetic construct
SKQDWHR

SEQ ID NO: 4848 - protein, 7 aa, synthetic construct
NIQDWHR

SEQ ID NO: 4849 - protein, 7 aa, synthetic construct
YNQDWHR

SEQ ID NO: 4850 - protein, 7 aa, synthetic construct
TVQDWHR

SEQ ID NO: 4851 - protein, 7 aa, synthetic construct
GTQDWHR

SEQ ID NO: 4852 - protein, 7 aa, synthetic construct
NTRDWHR

SEQ ID NO: 4853 - protein, 7 aa, synthetic construct
TLQDWHR

SEQ ID NO: 4854 - protein, 7 aa, synthetic construct
TMQDWHR

SEQ ID NO: 4855 - protein, 7 aa, synthetic construct
KNQDWHR

SEQ ID NO: 4856 - protein, 7 aa, synthetic construct
YTQDWHR

SEQ ID NO: 4857 - protein, 7 aa, synthetic construct
NKSDWHR

SEQ ID NO: 4858 - protein, 7 aa, synthetic construct
NTEDWHR

SEQ ID NO: 4859 - protein, 7 aa, synthetic construct
NIEDWHR

SEQ ID NO: 4860 - protein, 7 aa, synthetic construct
TRQDWHR

SEQ ID NO: 4861 - protein, 7 aa, synthetic construct
NSQDWHR

SEQ ID NO: 4862 - protein, 7 aa, synthetic construct
YTKDWHR

SEQ ID NO: 4863 - protein, 7 aa, synthetic construct
TTKDWHR

SEQ ID NO: 4864 - protein, 7 aa, synthetic construct
NIKDWHR

SEQ ID NO: 4865 - protein, 7 aa, synthetic construct
NNKDWHR

SEQ ID NO: 4866 - protein, 7 aa, synthetic construct
NSKDWHR

SEQ ID NO: 4867 - protein, 7 aa, synthetic construct
STKDWHR

SEQ ID NO: 4868 - protein, 7 aa, synthetic construct
ITKDWHR

SEQ ID NO: 4869 - protein, 7 aa, synthetic construct
NAKDWHR

SEQ ID NO: 4870 - protein, 7 aa, synthetic construct
KTKDWHR

SEQ ID NO: 4871 - protein, 7 aa, synthetic construct
GNQDWHR

SEQ ID NO: 4872 - protein, 7 aa, synthetic construct
SNQDWHR

SEQ ID NO: 4873 - protein, 7 aa, synthetic construct
HTKDWHR

SEQ ID NO: 4874 - protein, 7 aa, synthetic construct
DTKDWHR

SEQ ID NO: 4875 - protein, 7 aa, synthetic construct
NEQDWHR

SEQ ID NO: 4876 - protein, 7 aa, synthetic construct
NPKDWHR

SEQ ID NO: 4877 - protein, 7 aa, synthetic construct
YTEDWHR

SEQ ID NO: 4878 - protein, 7 aa, synthetic construct
NNRDWHR

SEQ ID NO: 4879 - protein, 7 aa, synthetic construct
INQDWHR

SEQ ID NO: 4880 - protein, 7 aa, synthetic construct
NHQDWHR

SEQ ID NO: 4881 - protein, 7 aa, synthetic construct
YIQDWHR

SEQ ID NO: 4882 - protein, 7 aa, synthetic construct
HNQDWHR

SEQ ID NO: 4883 - protein, 7 aa, synthetic construct
ITQDWHR

SEQ ID NO: 4884 - protein, 7 aa, synthetic construct
STQDWHR

SEQ ID NO: 4885 - protein, 7 aa, synthetic construct
NSNDWHR

SEQ ID NO: 4886 - protein, 7 aa, synthetic construct
NQQDWHR

SEQ ID NO: 4887 - protein, 7 aa, synthetic construct
NNPDWHR

SEQ ID NO: 4888 - protein, 7 aa, synthetic construct
ITEDWHR

SEQ ID NO: 4889 - protein, 7 aa, synthetic construct
NTNDWHR

SEQ ID NO: 4890 - protein, 7 aa, synthetic construct
FSQDWHR

SEQ ID NO: 4891 - protein, 7 aa, synthetic construct
NNHDWHR

SEQ ID NO: 4892 - protein, 7 aa, synthetic construct
NMQDWHR

SEQ ID NO: 4893 - protein, 7 aa, synthetic construct
NTSDWHR

SEQ ID NO: 4894 - protein, 7 aa, synthetic construct
NLQDWHR

SEQ ID NO: 4895 - protein, 7 aa, synthetic construct
SMQDWHR

SEQ ID NO: 4896 - protein, 7 aa, synthetic construct
NCQDWHR

SEQ ID NO: 4897 - protein, 7 aa, synthetic construct
VTQDWHR

SEQ ID NO: 4898 - protein, 8 aa, synthetic construct
TNTQDWHR

SEQ ID NO: 4899 - protein, 8 aa, synthetic construct
TNTKDWHR

SEQ ID NO: 4900 - protein, 8 aa, synthetic construct
TNNQDWHR

SEQ ID NO: 4901 - protein, 8 aa, synthetic construct
SNNQDWHR

SEQ ID NO: 4902 - protein, 8 aa, synthetic construct
TNKQDWHR

SEQ ID NO: 4903 - protein, 8 aa, synthetic construct
TNNEDWHR

SEQ ID NO: 4904 - protein, 8 aa, synthetic construct
SNKQDWHR

SEQ ID NO: 4905 - protein, 8 aa, synthetic construct
SNTQDWHR

SEQ ID NO: 4906 - protein, 8 aa, synthetic construct
TTNQDWHR

SEQ ID NO: 4907 - protein, 8 aa, synthetic construct
TNDQDWHR

SEQ ID NO: 4908 - protein, 8 aa, synthetic construct
TTIQDWHR

SEQ ID NO: 4909 - protein, 8 aa, synthetic construct
RNTQDWHR

SEQ ID NO: 4910 - protein, 8 aa, synthetic construct
TTKQDWHR

SEQ ID NO: 4911 - protein, 8 aa, synthetic construct
TTSQDWHR

SEQ ID NO: 4912 - protein, 8 aa, synthetic construct
TTDQDWHR

SEQ ID NO: 4913 - protein, 8 aa, synthetic construct
TNPSDWHR

SEQ ID NO: 4914 - protein, 8 aa, synthetic construct
TNKEDWHR

SEQ ID NO: 4915 - protein, 8 aa, synthetic construct
TTTQDWHR

SEQ ID NO: 4916 - protein, 8 aa, synthetic construct
TGKQDWHR

SEQ ID NO: 4917 - protein, 8 aa, synthetic construct
TTAQDWHR

SEQ ID NO: 4918 - protein, 8 aa, synthetic construct
TVKQDWHR

SEQ ID NO: 4919 - protein, 8 aa, synthetic construct
TNYQDWHR

SEQ ID NO: 4920 - protein, 8 aa, synthetic construct
TNTPDWHR

SEQ ID NO: 4921 - protein, 8 aa, synthetic construct
STKQDWHR

SEQ ID NO: 4922 - protein, 8 aa, synthetic construct
TTEQDWHR

SEQ ID NO: 4923 - protein, 8 aa, synthetic construct
TSKQDWHR

SEQ ID NO: 4924 - protein, 8 aa, synthetic construct
TNIQDWHR

SEQ ID NO: 4925 - protein, 8 aa, synthetic construct
TYNQDWHR

SEQ ID NO: 4926 - protein, 8 aa, synthetic construct
STIQDWHR

SEQ ID NO: 4927 - protein, 8 aa, synthetic construct
TTVQDWHR

SEQ ID NO: 4928 - protein, 8 aa, synthetic construct
TGTQDWHR

SEQ ID NO: 4929 - protein, 8 aa, synthetic construct
TNTRDWHR

SEQ ID NO: 4930 - protein, 8 aa, synthetic construct
TTLQDWHR

SEQ ID NO: 4931 - protein, 8 aa, synthetic construct
TTMQDWHR

SEQ ID NO: 4932 - protein, 8 aa, synthetic construct
ANNQDWHR

SEQ ID NO: 4933 - protein, 8 aa, synthetic construct
SNIQDWHR

SEQ ID NO: 4934 - protein, 8 aa, synthetic construct
TKNQDWHR

SEQ ID NO: 4935 - protein, 8 aa, synthetic construct
TYTQDWHR

SEQ ID NO: 4936 - protein, 8 aa, synthetic construct
TNKSDWHR

SEQ ID NO: 4937 - protein, 8 aa, synthetic construct
SNTEDWHR

SEQ ID NO: 4938 - protein, 8 aa, synthetic construct
TNTEDWHR

SEQ ID NO: 4939 - protein, 8 aa, synthetic construct
TNIEDWHR

SEQ ID NO: 4940 - protein, 8 aa, synthetic construct
TTRQDWHR

SEQ ID NO: 4941 - protein, 8 aa, synthetic construct
TNSQDWHR

SEQ ID NO: 4942 - protein, 8 aa, synthetic construct
TYTKDWHR

SEQ ID NO: 4943 - protein, 8 aa, synthetic construct
TTTKDWHR

SEQ ID NO: 4944 - protein, 8 aa, synthetic construct
TNIKDWHR

SEQ ID NO: 4945 - protein, 8 aa, synthetic construct
SNTKDWHR

SEQ ID NO: 4946 - protein, 8 aa, synthetic construct
TNNKDWHR

SEQ ID NO: 4947 - protein, 8 aa, synthetic construct
TNSKDWHR

SEQ ID NO: 4948 - protein, 8 aa, synthetic construct
TSTKDWHR

SEQ ID NO: 4949 - protein, 8 aa, synthetic construct
TITKDWHR

SEQ ID NO: 4950 - protein, 8 aa, synthetic construct
INTKDWHR

SEQ ID NO: 4951 - protein, 8 aa, synthetic construct
TNAKDWHR

SEQ ID NO: 4952 - protein, 8 aa, synthetic construct
TKTKDWHR

SEQ ID NO: 4953 - protein, 8 aa, synthetic construct
STNQDWHR

SEQ ID NO: 4954 - protein, 8 aa, synthetic construct
ANTKDWHR

SEQ ID NO: 4955 - protein, 8 aa, synthetic construct
RNNQDWHR

SEQ ID NO: 4956 - protein, 8 aa, synthetic construct
TGNQDWHR

SEQ ID NO: 4957 - protein, 8 aa, synthetic construct
TSNQDWHR

SEQ ID NO: 4958 - protein, 8 aa, synthetic construct
THTKDWHR

SEQ ID NO: 4959 - protein, 8 aa, synthetic construct
TDTKDWHR

SEQ ID NO: 4960 - protein, 8 aa, synthetic construct
TNEQDWHR

SEQ ID NO: 4961 - protein, 8 aa, synthetic construct
CNTQDWHR

SEQ ID NO: 4962 - protein, 8 aa, synthetic construct
TNPKDWHR

SEQ ID NO: 4963 - protein, 8 aa, synthetic construct
INNQDWHR

SEQ ID NO: 4964 - protein, 8 aa, synthetic construct
TYTEDWHR

SEQ ID NO: 4965 - protein, 8 aa, synthetic construct
NNNQDWHR

SEQ ID NO: 4966 - protein, 8 aa, synthetic construct
KNNQDWHR

SEQ ID NO: 4967 - protein, 8 aa, synthetic construct
TNNRDWHR

SEQ ID NO: 4968 - protein, 8 aa, synthetic construct
LNNQDWHR

SEQ ID NO: 4969 - protein, 8 aa, synthetic construct
TINQDWHR

SEQ ID NO: 4970 - protein, 8 aa, synthetic construct
TNHQDWHR

SEQ ID NO: 4971 - protein, 8 aa, synthetic construct
STTQDWHR

SEQ ID NO: 4972 - protein, 8 aa, synthetic construct
SNSQDWHR

SEQ ID NO: 4973 - protein, 8 aa, synthetic construct
STSQDWHR

SEQ ID NO: 4974 - protein, 8 aa, synthetic construct
TYIQDWHR

SEQ ID NO: 4975 - protein, 8 aa, synthetic construct
SGTQDWHR

SEQ ID NO: 4976 - protein, 8 aa, synthetic construct
THNQDWHR

SEQ ID NO: 4977 - protein, 8 aa, synthetic construct
TITQDWHR

SEQ ID NO: 4978 - protein, 8 aa, synthetic construct
TSTQDWHR

SEQ ID NO: 4979 - protein, 8 aa, synthetic construct
TNSNDWHR

SEQ ID NO: 4980 - protein, 8 aa, synthetic construct
TNQQDWHR

SEQ ID NO: 4981 - protein, 8 aa, synthetic construct
RNIQDWHR

SEQ ID NO: 4982 - protein, 8 aa, synthetic construct
TNNPDWHR

SEQ ID NO: 4983 - protein, 8 aa, synthetic construct
TITEDWHR

SEQ ID NO: 4984 - protein, 8 aa, synthetic construct
TNTNDWHR

SEQ ID NO: 4985 - protein, 8 aa, synthetic construct
TFSQDWHR

SEQ ID NO: 4986 - protein, 8 aa, synthetic construct
RNSQDWHR

SEQ ID NO: 4987 - protein, 8 aa, synthetic construct
INTQDWHR

SEQ ID NO: 4988 - protein, 8 aa, synthetic construct
RNTEDWHR

SEQ ID NO: 4989 - protein, 8 aa, synthetic construct
TNNHDWHR

SEQ ID NO: 4990 - protein, 8 aa, synthetic construct
TNMQDWHR

SEQ ID NO: 4991 - protein, 8 aa, synthetic construct
RTTQDWHR

SEQ ID NO: 4992 - protein, 8 aa, synthetic construct
SNIEDWHR

SEQ ID NO: 4993 - protein, 8 aa, synthetic construct
TNTSDWHR

SEQ ID NO: 4994 - protein, 8 aa, synthetic construct
KNTQDWHR

SEQ ID NO: 4995 - protein, 8 aa, synthetic construct
TNLQDWHR

SEQ ID NO: 4996 - protein, 8 aa, synthetic construct
TSMQDWHR

SEQ ID NO: 4997 - protein, 8 aa, synthetic construct
SYTQDWHR

SEQ ID NO: 4998 - protein, 8 aa, synthetic construct
TNCQDWHR

SEQ ID NO: 4999 - protein, 8 aa, synthetic construct
SSTQDWHR

SEQ ID NO: 5000 - protein, 8 aa, synthetic construct
TVTQDWHR

SEQ ID NO: 5001 - protein, 8 aa, synthetic construct
QNTQDWHR

SEQ ID NO: 5002 - protein, 6 aa, synthetic construct
DWHRIA

SEQ ID NO: 5003 - protein, 6 aa, synthetic construct
DWHRIY

SEQ ID NO: 5004 - protein, 6 aa, synthetic construct
DWHRVP

SEQ ID NO: 5005 - protein, 6 aa, synthetic construct
DWHRIN

SEQ ID NO: 5006 - protein, 6 aa, synthetic construct
DWHRVN

SEQ ID NO: 5007 - protein, 6 aa, synthetic construct
DWHRVY

SEQ ID NO: 5008 - protein, 6 aa, synthetic construct
DWHRVA

SEQ ID NO: 5009 - protein, 6 aa, synthetic construct
DWHRIS

SEQ ID NO: 5010 - protein, 6 aa, synthetic construct
DWHRIT

SEQ ID NO: 5011 - protein, 6 aa, synthetic construct
DWHRTA

SEQ ID NO: 5012 - protein, 6 aa, synthetic construct
DWHRMA

SEQ ID NO: 5013 - protein, 6 aa, synthetic construct
DWHRSA

SEQ ID NO: 5014 - protein, 6 aa, synthetic construct
DWHRIG

SEQ ID NO: 5015 - protein, 6 aa, synthetic construct
DWHRIE

SEQ ID NO: 5016 - protein, 6 aa, synthetic construct
DWHRIV

SEQ ID NO: 5017 - protein, 6 aa, synthetic construct
DWHRNA

SEQ ID NO: 5018 - protein, 6 aa, synthetic construct
DWHRLA

SEQ ID NO: 5019 - protein, 6 aa, synthetic construct
DWHRIP

SEQ ID NO: 5020 - protein, 6 aa, synthetic construct
DWHRFA

SEQ ID NO: 5021 - protein, 6 aa, synthetic construct
DWHRVS

SEQ ID NO: 5022 - protein, 6 aa, synthetic construct
DWHRVT

SEQ ID NO: 5023 - protein, 6 aa, synthetic construct
DWHRIW

SEQ ID NO: 5024 - protein, 6 aa, synthetic construct
DWHRIF

SEQ ID NO: 5025 - protein, 6 aa, synthetic construct
DWHRIQ

SEQ ID NO: 5026 - protein, 6 aa, synthetic construct
DWHRVQ

SEQ ID NO: 5027 - protein, 7 aa, synthetic construct
DWHRIAQ

SEQ ID NO: 5028 - protein, 7 aa, synthetic construct
DWHRIAG

SEQ ID NO: 5029 - protein, 7 aa, synthetic construct
DWHRIYQ

SEQ ID NO: 5030 - protein, 7 aa, synthetic construct
DWHRVPQ

SEQ ID NO: 5031 - protein, 7 aa, synthetic construct
DWHRIAN

SEQ ID NO: 5032 - protein, 7 aa, synthetic construct
DWHRINQ

SEQ ID NO: 5033 - protein, 7 aa, synthetic construct
DWHRVNQ

SEQ ID NO: 5034 - protein, 7 aa, synthetic construct
DWHRVYQ

SEQ ID NO: 5035 - protein, 7 aa, synthetic construct
DWHRVAN

SEQ ID NO: 5036 - protein, 7 aa, synthetic construct
DWHRISG

SEQ ID NO: 5037 - protein, 7 aa, synthetic construct
DWHRISQ

SEQ ID NO: 5038 - protein, 7 aa, synthetic construct
DWHRVAQ

SEQ ID NO: 5039 - protein, 7 aa, synthetic construct
DWHRITQ

SEQ ID NO: 5040 - protein, 7 aa, synthetic construct
DWHRTAQ

SEQ ID NO: 5041 - protein, 7 aa, synthetic construct
DWHRMAQ

SEQ ID NO: 5042 - protein, 7 aa, synthetic construct
DWHRSAQ

SEQ ID NO: 5043 - protein, 7 aa, synthetic construct
DWHRIGQ

SEQ ID NO: 5044 - protein, 7 aa, synthetic construct
DWHRIEQ

SEQ ID NO: 5045 - protein, 7 aa, synthetic construct
DWHRIVQ

SEQ ID NO: 5046 - protein, 7 aa, synthetic construct
DWHRNAQ

SEQ ID NO: 5047 - protein, 7 aa, synthetic construct
DWHRLAQ

SEQ ID NO: 5048 - protein, 7 aa, synthetic construct
DWHRIAK

SEQ ID NO: 5049 - protein, 7 aa, synthetic construct
DWHRIAH

SEQ ID NO: 5050 - protein, 7 aa, synthetic construct
DWHRIPQ

SEQ ID NO: 5051 - protein, 7 aa, synthetic construct
DWHRIAR

SEQ ID NO: 5052 - protein, 7 aa, synthetic construct
DWHRIAE

SEQ ID NO: 5053 - protein, 7 aa, synthetic construct
DWHRIAL

SEQ ID NO: 5054 - protein, 7 aa, synthetic construct
DWHRIAP

SEQ ID NO: 5055 - protein, 7 aa, synthetic construct
DWHRFAQ

SEQ ID NO: 5056 - protein, 7 aa, synthetic construct
DWHRVSQ

SEQ ID NO: 5057 - protein, 7 aa, synthetic construct
DWHRVTM

SEQ ID NO: 5058 - protein, 7 aa, synthetic construct
DWHRISM

SEQ ID NO: 5059 - protein, 7 aa, synthetic construct
DWHRIWQ

SEQ ID NO: 5060 - protein, 7 aa, synthetic construct
DWHRIFQ

SEQ ID NO: 5061 - protein, 7 aa, synthetic construct
DWHRIQQ

SEQ ID NO: 5062 - protein, 7 aa, synthetic construct
DWHRVQQ

SEQ ID NO: 5063 - protein, 7 aa, synthetic construct
DWHRIFM

SEQ ID NO: 5064 - protein, 7 aa, synthetic construct
DWHRIAM

SEQ ID NO: 5065 - protein, 7 aa, synthetic construct
DWHRISN

SEQ ID NO: 5066 - protein, 4 aa, synthetic construct
TGWV

SEQ ID NO: 5067 - protein, 4 aa, synthetic construct
TGWA

SEQ ID NO: 5068 - protein, 4 aa, synthetic construct
TNWS

SEQ ID NO: 5069 - protein, 4 aa, synthetic construct
SNWV

SEQ ID NO: 5070 - protein, 4 aa, synthetic construct
TNWV

SEQ ID NO: 5071 - protein, 4 aa, synthetic construct
TNWI

SEQ ID NO: 5072 - protein, 4 aa, synthetic construct
NNWV

SEQ ID NO: 5073 - protein, 4 aa, synthetic construct
TGWS

SEQ ID NO: 5074 - protein, 4 aa, synthetic construct
TGWI

SEQ ID NO: 5075 - protein, 4 aa, synthetic construct
TGWC

SEQ ID NO: 5076 - protein, 4 aa, synthetic construct
TGWG

SEQ ID NO: 5077 - protein, 4 aa, synthetic construct
SGWV

SEQ ID NO: 5078 - protein, 4 aa, synthetic construct
PGWV

SEQ ID NO: 5079 - protein, 4 aa, synthetic construct
TGSV

SEQ ID NO: 5080 - protein, 4 aa, synthetic construct
TDWV

SEQ ID NO: 5081 - protein, 4 aa, synthetic construct
TGCV

SEQ ID NO: 5082 - protein, 4 aa, synthetic construct
TGRV

SEQ ID NO: 5083 - protein, 4 aa, synthetic construct
TGLV

SEQ ID NO: 5084 - protein, 4 aa, synthetic construct
TGGV

SEQ ID NO: 5085 - protein, 4 aa, synthetic construct
AGWV

SEQ ID NO: 5086 - protein, 4 aa, synthetic construct
IGWV

SEQ ID NO: 5087 - protein, 4 aa, synthetic construct
TGWD

SEQ ID NO: 5088 - protein, 4 aa, synthetic construct
NGWV

SEQ ID NO: 5089 - protein, 4 aa, synthetic construct
TGWF

SEQ ID NO: 5090 - protein, 4 aa, synthetic construct
TRWV

SEQ ID NO: 5091 - protein, 4 aa, synthetic construct
TVWV

SEQ ID NO: 5092 - protein, 4 aa, synthetic construct
TGWL

SEQ ID NO: 5093 - protein, 4 aa, synthetic construct
TAWV

SEQ ID NO: 5094 - protein, 4 aa, synthetic construct
TSWV

SEQ ID NO: 5095 - protein, 4 aa, synthetic construct
TGWT

SEQ ID NO: 5096 - protein, 4 aa, synthetic construct
SVWV

SEQ ID NO: 5097 - protein, 4 aa, synthetic construct
TQWV

SEQ ID NO: 5098 - protein, 4 aa, synthetic construct
PGWG

SEQ ID NO: 5099 - protein, 4 aa, synthetic construct
AQAQ

SEQ ID NO: 5100 - protein, 9 aa, synthetic construct
TNHQSAQAQ

SEQ ID NO: 5101 - protein, 5 aa, synthetic construct
TNHQS

SEQ ID NO: 5102 - protein, 6 aa, synthetic construct
TNHQSA

SEQ ID NO: 5103 - protein, 7 aa, synthetic construct
TNHQSAQ

SEQ ID NO: 5104 - protein, 8 aa, synthetic construct
TNHQSAQA

SEQ ID NO: 5105 - protein, 4 aa, synthetic construct
NHQS

SEQ ID NO: 5106 - protein, 5 aa, synthetic construct
NHQSA

SEQ ID NO: 5107 - protein, 6 aa, synthetic construct
NHQSAQ

SEQ ID NO: 5108 - protein, 7 aa, synthetic construct
NHQSAQA

SEQ ID NO: 5109 - protein, 8 aa, synthetic construct
NHQSAQAQ

SEQ ID NO: 5110 - protein, 4 aa, synthetic construct
HQSA

SEQ ID NO: 5111 - protein, 5 aa, synthetic construct
HQSAQ

SEQ ID NO: 5112 - protein, 6 aa, synthetic construct
HQSAQA

SEQ ID NO: 5113 - protein, 7 aa, synthetic construct
HQSAQAQ

SEQ ID NO: 5114 - protein, 4 aa, synthetic construct
QSAQ

SEQ ID NO: 5115 - protein, 5 aa, synthetic construct
QSAQA

SEQ ID NO: 5116 - protein, 6 aa, synthetic construct
QSAQAQ

SEQ ID NO: 5117 - protein, 4 aa, synthetic construct
SAQA

SEQ ID NO: 5118 - protein, 5 aa, synthetic construct
SAQAQ

SEQ ID NO: 5119 - protein, 5 aa, synthetic construct
TNTQD

SEQ ID NO: 5120 - protein, 6 aa, synthetic construct
TNTQDW

SEQ ID NO: 5121 - protein, 7 aa, synthetic construct
TNTQDWH

SEQ ID NO: 5122 - protein, 20 aa, synthetic construct
VATNHQSAQAQAQTGWVQNQ

SEQ ID NO: 5123 - protein, 12 aa, synthetic construct
TNHQSAQAQAQT

1. An adeno-associated virus (AAV) capsid variant, comprising an amino acid sequence having the following formula: [N1]-[N2]-[N3] (SEQ ID NO: 4681), wherein [N2] comprises the amino acid sequence of DWHR (SEQ ID NO: 4682) and wherein:
(i) [N1] comprises positions X₁, X₂, X₃, and X₄, wherein position X₄ is Q, K, E, S, P, R, N, or H; and/or
(ii) [N3] comprises positions X₅, X₆, and X₇, wherein position X₅ is I, V, T, M, S, N, L, or F;
wherein the AAV capsid variant comprises the amino acid sequence of positions 203-736 of SEQ ID NO: 981, or an amino acid sequence at least 95% identical to positions 203-736 of SEQ ID NO: 981.

2. The AAV capsid variant of claim 1, wherein;
(A) [N1] comprises positions X₁, X₂, X₃, and X₄, wherein:
(i) position X₁ is T, S, R, A, I, C, N, K, L, or Q;
(ii) position X₂ is N, T, G, V, S, Y, K, I, H, D, or F;
(iii) position X₃ is T, N, K, D, I, S, P, A, Y, E, V, L, M, R, H, Q, or C; and
(iv) position X₄ is Q, K, E, S, P, R, N, or H; and/or
(B) [N3] comprises positions X₅, X₆, and X₇, wherein:
(i) position X₆ is A, Y, P, N, S, T, G, E, V, W, F, or Q;
(ii) position X₇ is Q, G, N, K, H, R, E, L, P, or M; and
(iii) position X₅ is I, V, T, M, S, N, L, or F.

3. The AAV capsid variant of claim 1, wherein:
(i) [N1] comprises TNTQ (SEQ ID NO: 4688), TNTK (SEQ ID NO: 4689), TNNQ (SEQ ID NO: 4690), SNNQ (SEQ ID NO: 4691), TNKQ (SEQ ID NO: 4692), TNNE (SEQ ID NO: 4693), SNKQ (SEQ ID NO: 4694), SNTQ (SEQ ID NO: 4695), TTNQ (SEQ ID NO: 4696), TNDQ (SEQ ID NO: 4697), TTIQ (SEQ ID NO: 4698), RNTQ (SEQ ID NO: 4699), TTKQ (SEQ ID NO: 4700), TTSQ (SEQ ID NO: 4701), TTDQ (SEQ ID NO: 4702), TNPS (SEQ ID NO: 4703), TNKE (SEQ ID NO: 4704), TTTQ (SEQ ID NO: 4705), TGKQ (SEQ ID NO: 4706), TTAQ (SEQ ID NO: 4707), TVKQ (SEQ ID NO: 4708), TNYQ (SEQ ID NO: 4709), TNTP (SEQ ID NO: 4710), STKQ (SEQ ID NO: 4711), TTEQ (SEQ ID NO: 4712), TSKQ (SEQ ID NO: 4713), TNIQ (SEQ ID NO: 4714), TYNQ (SEQ ID NO: 4715), STIQ (SEQ ID NO: 4716), TTVQ (SEQ ID NO: 4717), TGTQ (SEQ ID NO: 4718), TNTR (SEQ ID NO: 4719), TTLQ (SEQ ID NO: 4720), TTMQ (SEQ ID NO: 4721), ANNQ (SEQ ID NO: 4722), SNIQ (SEQ ID NO: 4723), TKNQ (SEQ ID NO: 4724), TYTQ (SEQ ID NO: 4725), TNKS (SEQ ID NO: 4726), SNTE (SEQ ID NO: 4727), TNTE (SEQ ID NO: 4728), TNIE (SEQ ID NO: 4729), TTRQ (SEQ ID NO: 4730), TNSQ (SEQ ID NO: 4731), TYTK (SEQ ID NO: 4732), TTTK (SEQ ID NO: 4733), TNIK (SEQ ID NO: 4734), SNTK (SEQ ID NO: 4735), TNNK (SEQ ID NO: 4736), TNSK (SEQ ID NO: 4737), TSTK (SEQ ID NO: 4738), TITK (SEQ ID NO: 4739), INTK (SEQ ID NO: 4740), TNAK (SEQ ID NO: 4741), TKTK (SEQ ID NO: 4742), STNQ (SEQ ID NO: 4743), ANTK (SEQ ID NO: 4744), RNNQ (SEQ ID NO: 4745), TGNQ (SEQ ID NO: 4746), TSNQ (SEQ ID NO: 4747), THTK (SEQ ID NO: 4748), TDTK (SEQ ID NO: 4749), TNEQ (SEQ ID NO: 4750), CNTQ (SEQ ID NO: 4751), TNPK (SEQ ID NO: 4752), INNQ (SEQ ID NO: 4753), TYTE (SEQ ID NO: 4754), NNNQ (SEQ ID NO: 4755), KNNQ (SEQ ID NO: 4756), TNNR (SEQ ID NO: 4757), LNNQ (SEQ ID NO: 4758), TINQ (SEQ ID NO: 4759), TNHQ (SEQ ID NO: 4760), STTQ (SEQ ID NO: 4761), SNSQ (SEQ ID NO: 4762), STSQ (SEQ ID NO: 4763), TYIQ (SEQ ID NO: 4764), SGTQ (SEQ ID NO: 4765), THNQ (SEQ ID NO: 4766), TITQ (SEQ ID NO: 4767), TSTQ (SEQ ID NO: 4768), TNSN (SEQ ID NO: 4769), TNQQ (SEQ ID NO: 4770), RNIQ (SEQ ID NO: 4771), TNNP (SEQ ID NO: 4772), TITE (SEQ ID NO: 4773), TNTN (SEQ ID NO: 4774), TFSQ (SEQ ID NO: 4775), RNSQ (SEQ ID NO: 4776), INTQ (SEQ ID NO: 4777), RNTE (SEQ ID NO: 4778), TNNH (SEQ ID NO: 4779), TNMQ (SEQ ID NO: 4780), RTTQ (SEQ ID NO: 4781), SNIE (SEQ ID NO: 4782), TNTS (SEQ ID NO: 4783), KNTQ (SEQ ID NO: 4784), TNLQ (SEQ ID NO: 4785), TSMQ (SEQ ID NO: 4786), SYTQ (SEQ ID NO: 4787), TNCQ (SEQ ID NO: 4788), SSTQ (SEQ ID NO: 4789), TVTQ (SEQ ID NO: 4790), or QNTQ (SEQ ID NO: 4791); and/or
(ii) [N3] comprises IAQ, IAG, IYQ, VPQ, IAN, INQ, VNQ, VYQ, VAN, ISG, ISQ, VAQ, ITQ, TAQ, MAQ, SAQ, IGQ, IEQ, IVO, NAQ, LAQ, IAK, IAH, IPQ, IAR, IAE, IAL, IAP, FAQ, VSQ, VTM, ISM, IWQ, IFQ, IQQ, VQQ, IFM, IAM, or ISN.

4. (canceled)

5. The AAV capsid variant of claim 1, wherein;
(i) [N1]-[N2] comprises TNTQDWHR (SEQ ID NO: 4898), TNTKDWHR (SEQ ID NO: 4899), TNNQDWHR (SEQ ID NO: 4900), SNNQDWHR (SEQ ID NO: 4901), TNKQDWHR (SEQ ID NO: 4902), TNNEDWHR (SEQ ID NO: 4903), SNKQDWHR (SEQ ID NO: 4904), SNTQDWHR (SEQ ID NO: 4905), TTNQDWHR (SEQ ID NO: 4906), TNDQDWHR (SEQ ID NO: 4907), TTIQDWHR (SEQ ID NO: 4908), RNTQDWHR (SEQ ID NO: 4909), TTKQDWHR (SEQ ID NO: 4910), TTSQDWHR (SEQ ID NO: 4911), TTDQDWHR (SEQ ID NO: 4912), TNPSDWHR (SEQ ID NO: 4913), TNKEDWHR (SEQ ID NO: 4914), TTTQDWHR (SEQ ID NO: 4915), TGKQDWHR (SEQ ID NO: 4916), TTAQDWHR (SEQ ID NO: 4917), TVKQDWHR (SEQ ID NO: 4918), TNYQDWHR (SEQ ID NO: 4919), TNTPDWHR (SEQ ID NO: 4920), STKQDWHR (SEQ ID NO: 4921), TTEQDWHR (SEQ ID NO: 4922), TSKQDWHR (SEQ ID NO: 4923), TNIQDWHR (SEQ ID NO: 4924), TYNQDWHR (SEQ ID NO: 4925), STIQDWHR (SEQ ID NO: 4926), TTVQDWHR (SEQ ID NO: 4927), TGTQDWHR (SEQ ID NO: 4928), TNTRDWHR (SEQ ID NO: 4929), TTLQDWHR (SEQ ID NO: 4930), TTMQDWHR (SEQ ID NO: 4931), ANNQDWHR (SEQ ID NO: 4932), SNIQDWHR (SEQ ID NO: 4933), TKNQDWHR (SEQ ID NO: 4934), TYTQDWHR (SEQ ID NO: 4935), TNKSDWHR (SEQ ID NO: 4936), SNTEDWHR (SEQ ID NO: 4937), TNTEDWHR (SEQ ID NO: 4938), TNIEDWHR (SEQ ID NO: 4939), TTRQDWHR (SEQ ID NO: 4940), TNSQDWHR (SEQ ID NO: 4941), TYTKDWHR (SEQ ID NO: 4942), TTTKDWHR (SEQ ID NO: 4943), TNIKDWHR (SEQ ID NO: 4944), SNTKDWHR (SEQ ID NO: 4945), TNNKDWHR (SEQ ID NO: 4946), TNSKDWHR (SEQ ID NO: 4947), TSTKDWHR (SEQ ID NO: 4948), TITKDWHR (SEQ ID NO: 4949), INTKDWHR (SEQ ID NO: 4950), TNAKDWHR (SEQ ID NO: 4951), TKTKDWHR (SEQ ID NO: 4952), STNQDWHR (SEQ ID NO: 4953), ANTKDWHR (SEQ ID NO: 4954), RNNQDWHR (SEQ ID NO: 4955), TGNQDWHR (SEQ ID NO: 4956), TSNQDWHR (SEQ ID NO: 4957), THTKDWHR (SEQ ID NO: 4958), TDTKDWHR (SEQ ID NO: 4959), TNEQDWHR (SEQ ID NO: 4960), CNTQDWHR (SEQ ID NO: 4961), TNPKDWHR (SEQ ID NO: 4962), INNQDWHR (SEQ ID NO: 4963), TYTEDWHR (SEQ ID NO: 4964), NNNQDWHR (SEQ ID NO: 4965), KNNQDWHR (SEQ ID NO: 4966), TNNRDWHR (SEQ ID NO: 4967), LNNQDWHR (SEQ ID NO: 4968), TINQDWHR (SEQ ID NO: 4969), TNHQDWHR (SEQ ID NO: 4970), STTQDWHR (SEQ ID NO: 4971), SNSQDWHR (SEQ ID NO: 4972), STSQDWHR (SEQ ID NO: 4973), TYIQDWHR (SEQ ID NO: 4974), SGTQDWHR (SEQ ID NO: 4975), THNQDWHR (SEQ ID NO: 4976), TITQDWHR (SEQ ID NO: 4977), TSTQDWHR (SEQ ID NO: 4978), TNSNDWHR (SEQ ID NO: 4979), TNQQDWHR (SEQ ID NO: 4980), RNIQDWHR (SEQ ID NO: 4981), TNNPDWHR (SEQ ID NO: 4982), TITEDWHR (SEQ ID NO: 4983), TNTNDWHR (SEQ ID NO: 4984), TFSQDWHR (SEQ ID NO: 4985), RNSQDWHR (SEQ ID NO: 4986), INTQDWHR (SEQ ID NO: 4987), RNTEDWHR (SEQ ID NO: 4988), TNNHDWHR (SEQ ID NO: 4989), TNMQDWHR (SEQ ID NO: 4990), RTTQDWHR (SEQ ID NO: 4991), SNIEDWHR (SEQ ID NO: 4992), TNTSDWHR (SEQ ID NO: 4993), KNTQDWHR (SEQ ID NO: 4994), TNLQDWHR (SEQ ID NO: 4995), TSMQDWHR (SEQ ID NO: 4996), SYTQDWHR (SEQ ID NO: 4997), TNCQDWHR (SEQ ID NO: 4998), SSTQDWHR (SEQ ID NO: 4999), TVTQDWHR (SEQ ID NO: 5000), or QNTQDWHR (SEQ ID NO: 5001);
(ii) [N2]-[N3] comprises DWHRIAQ (SEQ ID NO: 5027), DWHRIAG (SEQ ID NO: 5028), DWHRIYQ (SEQ ID NO: 5029), DWHRVPQ (SEQ ID NO: 5030), DWHRIAN (SEQ ID NO: 5031), DWHRINQ (SEQ ID NO: 5032), DWHRVNQ (SEQ ID NO: 5033), DWHRVYQ (SEQ ID NO: 5034), DWHRVAN (SEQ ID NO: 5035), DWHRISG (SEQ ID NO: 5036), DWHRISQ (SEQ ID NO: 5037), DWHR VAQ (SEQ ID NO: 5038), DWHRITQ (SEQ ID NO: 5039), DWHRTAQ (SEQ ID NO: 5040), DWHRMAQ (SEQ ID NO: 5041), DWHRSAQ (SEQ ID NO: 5042), DWHRIGQ (SEQ ID NO: 5043), DWHRIEQ (SEQ ID NO: 5044), DWHRIVQ (SEQ ID NO: 5045), DWHRNAQ (SEQ ID NO: 5046), DWHRLAQ (SEQ ID NO: 5047), DWHRIAK (SEQ ID NO: 5048), DWHRIAH (SEQ ID NO: 5049), DWHRIPQ (SEQ ID NO: 5050), DWHRIAR (SEQ ID NO: 5051), DWHRIAE (SEQ ID NO: 5052), DWHRIAL (SEQ ID NO: 5053), DWHRIAP (SEQ ID NO: 5054), DWHRFAQ (SEQ ID NO: 5055), DWHRVSQ (SEQ ID NO: 5056), DWHR VTM (SEQ ID NO: 5057), DWHRISM (SEQ ID NO: 5058), DWHRIWQ (SEQ ID NO: 5059), DWHRIFQ (SEQ ID NO: 5060), DWHRIQQ (SEQ ID NO: 5061), DWHRVQQ (SEQ ID NO: 5062), DWHRIFM (SEQ ID NO: 5063), DWHRIAM (SEQ ID NO: 5064), or DWHRISN (SEQ ID NO: 5065); and/or
(iii) [N1]-[N2]-[N3] comprises the amino acid sequence of any one of SEQ ID NOs: 343-538.

6.-13. (canceled)

14. The AAV capsid variant of claim 1, which further comprises [N4], wherein [N4] comprises TGWV (SEQ ID NO: 5066), TGWA (SEQ ID NO: 5067), TNWS (SEQ ID NO: 5068), SNWV (SEQ ID NO: 5069), TNWV (SEQ ID NO: 5070), TNWI (SEQ ID NO: 5071), NNWV (SEQ ID NO: 5072), TGWS (SEQ ID NO: 5073), TGWI (SEQ ID NO: 5074), TGWC (SEQ ID NO: 5075), TGWG (SEQ ID NO: 5076), SGWV (SEQ ID NO: 5077), PGWV (SEQ ID NO: 5078), TGSV (SEQ ID NO: 5079), TDWV (SEQ ID NO: 5080), TGCV (SEQ ID NO: 5081), TGRV (SEQ ID NO: 5082), TGLV (SEQ ID NO: 5083), TGGV (SEQ ID NO: 5084), AGWV (SEQ ID NO: 5085), IGWV (SEQ ID NO: 5086), TGWD (SEQ ID NO: 5087), NGWV (SEQ ID NO: 5088), TGWF (SEQ ID NO: 5089), TRWV (SEQ ID NO: 5090), TVWV (SEQ ID NO: 5091), TGWL (SEQ ID NO: 5092), TAWV (SEQ ID NO: 5093), TSWV (SEQ ID NO: 5094), TGWT (SEQ ID NO: 5095), SVWV (SEQ ID NO: 5096), TQWV (SEQ ID NO: 5097), or PGWG (SEQ ID NO: 5098).

15. The AAV capsid variant of claim 14, wherein [N1]-[N2]-[N3]-[N4] comprises:
(i) the amino acid sequence of any one of SEQ ID NOs: 201-245, 247-250, 253-255, 257-265, 268-274, 276-286, 288, 290-297, 299-303, 305-309, 311, 313-319, 323-328, 330-337, 339-342, 539-542, 544, 546, 547, 549-557, 559-589, 592, 593, 595, 596, 598, 599, 601-608, 610-614, 616-622, 625, 628, 630, 631, 633, 636, 638, 639-646, 649, 651-657, 667, 669, 670, 672, 673, 679-683, 685-690, 692, 693, 695, 697, 699-701, 703-705, 708-710, 712-717, 719-723, 728-731, 733-738, 740, or 742;
(ii)
(SEQ ID NO: 201)
TNTQDWHRIAQTGWV;
or
(iii)
(SEQ ID NO: 202)
TNTKDWHRIAQTGWV.

16. (canceled)

17. The AAV capsid variant of claim 14, wherein:
(i) [N1]-[N2]-[N3] is present in loop VIII, wherein loop VIII comprises positions 580-599 of SEQ ID NO: 981;
(ii) [N4] is present in loop VIII, wherein loop VIII comprises positions 580-599 of SEQ ID NO: 981;
(iii) X₁ of [N1] is present at position 582, X₂ of [N1] is present at position 583, X₃ of [N1] is present at position 584, and X₄ of [N1] is present at position 585, numbered according to SEQ ID NO: 981;
(iv) [N2] is present at positions 586-589, numbered according to SEQ ID NO: 981;
(v) X₅ of [N3] is present at position 590, X₆ of [N3] is present at position 591, and X₇ of [N3] is present at position 592, numbered according to SEQ ID NO: 981; and
(vi) [N4] is present at positions 593, 596, numbered according to SEQ ID NO: 981.

18. An adeno-associated virus (AAV) capsid variant comprising:
(a) the amino acid sequence of any of the sequences provided in Tables 1, 2A, 2B, 9, 14, 15 or 16;
(b) an amino acid sequence comprising at least 7, 8, 9, 10, 11, 12, 13, or 14 consecutive amino acids from any one of the sequences provided in Tables 1, 2A, 2B, 9, 14, 15, or 16;
(c) an amino acid sequence comprising at least one, two, or three but no more than four different amino acids, relative to any one of the sequences provided in Tables 1, 2A, 2B, 9, 14, 15, or 16; or
(d) an amino acid sequence comprising at least one, two, or three but no more than four substitutions, relative to the amino acid sequence of any one of the sequences provided in Tables 1, 2A, 2B, 9, 14, 15, or 16;
wherein the AAV capsid variant comprises the amino acid sequence of positions 203-736 of SEQ ID NO: 981, or an amino acid sequence at least 95% identical to positions 203-736 of SEQ ID NO: 981.

19. (canceled)

20. An adeno-associated virus (AAV) capsid variant comprising an amino acid sequence at least 95% identical to positions 203-736 of SEQ ID NO: 981, wherein the AAV capsid variant comprises the amino acid T at position 584, the amino acid D at position 586, the amino acid W at position 587, the amino acid H at position 588, the amino acid R at position 589, and the amino acid I at position 590, numbered according to SEQ ID NO: 981.

21.-22. (canceled)

23. The AAV capsid variant of claim 20, which comprises:
(i) the amino acid sequence of positions 203-736 of SEQ ID NO: 981, or an amino acid sequence at least 98% identical thereto;
(ii) the amino acid sequence of positions 138-736 of SEQ ID NO: 981, or an amino acid sequence at least 95% or at least 98% identical thereto; and/or
(iii) the amino acid sequence of SEQ ID NO: 981, or an amino acid sequence at least 95% or at least 98% identical thereto.

24.-26. (canceled)

27. The AAV capsid variant of claim 20, which has increased tropism for a brain cell or a brain tissue, relative to the tropism of an AAV capsid protein comprising the amino acid sequence of SEQ ID NO: 138.

28. A polynucleotide encoding the AAV capsid variant of claim 20, optionally wherein the polynucleotide comprises the nucleotide sequence of SEQ ID NO: 983, or a nucleotide sequence at least 90% identical thereto.

29. (canceled)

30. A peptide comprising:
(a) the amino acid sequence of any of the sequences provided in Tables 1, 2A, 2B, 14, 15, or 16;
(b) an amino acid sequence comprising at least 7, 8, 9, 10, 11, 12, 13, or 14 consecutive amino acids from any one of the sequences provided in Tables 1, 2A, 2B, 14, 15, or 16;
(c) an amino acid sequence comprising at least one, two, or three but no more than four different amino acids relative to the amino acid sequence of any one of the sequences provided in Tables 1, 2A, 2B, 14, 15, or 16; or
(d) an amino acid sequence comprising at least one, two, or three but no more than four substitutions, relative to the amino acid sequence of any one of the sequences provided in Tables 1, 2A, 2B, 14, 15, or 16.

31.-32. (canceled)

33. An AAV particle comprising the AAV capsid variant of claim 20.

34. (canceled)

35. The AAV particle of claim 33, which comprises a nucleotide sequence encoding a payload, wherein the encoded payload comprises a protein; an antibody; an enzyme, or an inhibitory RNA.

36.-37. (canceled)

38. The AAV particle of claim 35, which further comprises:
(i) a promoter operably linked to the nucleotide sequence encoding the payload;
(ii) a 5′ inverted terminal repeat (ITR) and/or a 3′ ITR;
(iii) an enhancer;
(iv) an intron region;
(v) an exon region;
(vi) a nucleotide sequence encoding a miR binding site; and/or
(vii) a polyadenylation (polyA) signal sequence.

39.-42. (canceled)

43. A vector comprising a polynucleotide encoding the AAV capsid variant of claim 20.

44. A cell comprising the AAV capsid variant of claim 20, optionally wherein:
(i) the cell is a mammalian cell or an insect cell;
(ii) the cell is a cell of a brain region or a spinal cord region; and/or
(iii) the cell is a neuron, a sensory neuron, a motor neuron, an astrocyte, a glial cell, oligodendrocyte, a heart cell, or a muscle cell.

45. A method of making an AAV particle, comprising:
(i) providing a host cell comprising a viral genome and a polynucleotide encoding the AAV capsid variant of claim 20; and
(ii) incubating the host cell under conditions suitable to enclose the viral genome in the AAV capsid variant;
thereby making the AAV particle.

46. A pharmaceutical composition comprising, an AAV particle comprising the AAV capsid variant of claim 20, and a pharmaceutically acceptable excipient.

47. A method of delivering a payload to a cell or tissue comprising administering an AAV particle comprising the AAV capsid variant of claim 20, thereby delivering the payload to the cell or tissue.

48. The method of claim 47, wherein the cell is:
(i) a cell of a brain region or a spinal cord region;
(ii) a cell of the heart;
(iii) cell of the muscle or liver;
(iv) a neuron, a sensory neuron, a motor neuron, an astrocyte, a glial cell, or an oligodendrocyte; or
(v) in a subject, optionally wherein the subject has, has been diagnosed with having, or is at risk of having a genetic disorder, a neurological disorder, a neuro-oncological disorder, a muscular disorder, or a neuromuscular disorder.

49. (canceled)

50. A method of treating a subject having or diagnosed with having a genetic disorder, a neurological disorder, a neurodegenerative disorder, a neuro-oncological disorder, a muscular disorder, or a neuromuscular disorder, comprising administering to the subject an AAV particle comprising the AAV capsid variant of claim 20, thereby treating the subject.

51.-61. (canceled)
